(19) United States
(12) Patent Application Publication
(10) Pub. No.: US 2010/0240730 A1
(43) Pub. Date: Sep. 23, 2010

(54) RNA Interference Mediated Inhibition of Gene Expression Using Chemically Modified Short Interfering Nucleic Acid (siNA)

(75) Inventors: LEONID BEIGELMAN, SAN MATEO, CA (US); JAMES MCSWIGGEN, BOULDER, CO (US)

Correspondence Address: Merck;c/o Sirna Therapeutics, Inc., 1700 Owens Street, 4th Floor, San Francisco, CA, 94158, US

(73) Assignee: MERCK SHARP AND DOHME CORP., RAHWAY, NJ (US)

(21) Appl. No.: 12/748,075

(22) Filed: Mar. 26, 2010

Related U.S. Application Data
(63) Continuation of application No. 10/557,542, filed on Jul. 3, 2006, now abandoned.
Application No. 10/557,542 is a continuation-in-part of application No. 10/826,966, filed on Apr. 16, 2004, now abandoned.
Application No. 10/826,966 is a continuation-in-part of application No. 10/757,803, filed on Jan. 14, 2004.
Application No. 10/757,803 is a continuation-in-part of application No. 10/720,448, filed on Nov. 24, 2003.
Application No. 10/720,448 is a continuation-in-part of application No. 10/693,059, filed on Oct. 23, 2003, now abandoned.
Application No. 10/693,059 is a continuation-in-part of application No. 10/444,853, filed on May 23, 2003.
Application No. 10/444,853 is a continuation-in-part of application No. PCT/US03/05346, filed on Feb. 20, 2003.
Application No. PCT/US03/05346 is a continuation-in-part of application No. PCT/US03/05028, filed on Feb. 20, 2003.
(60) Provisional application No. 60/440,129, filed on Jan. 15, 2003.
(60) Provisional application No. 60/409,293, filed on Sep. 9, 2002.
(60) Provisional application No. 60/408,378, filed on Sep. 5, 2002.
(60) Provisional application No. 60/406,784, filed on Aug. 29, 2002.
(60) Provisional application No. 60/386,782, filed on Jun. 6, 2002.
(60) Provisional application No. 60/363,124, filed on Mar. 11, 2002.
(60) Provisional application No. 60/358,580, filed on Feb. 20, 2002.
(60) Provisional application No. 60/440,129, filed on Jan. 15, 2003.
(60) Provisional application No. 60/409,293, filed on Sep. 9, 2002.
(60) Provisional application No. 60/408,378, filed on Sep. 5, 2002.
(60) Provisional application No. 60/406,784, filed on Aug. 29, 2002.
(60) Provisional application No. 60/386,782, filed on Jun. 6, 2002.
(60) Provisional application No. 60/363,124, filed on Mar. 11, 2002.
(60) Provisional application No. 60/358,580, filed on Feb. 20, 2002.

(51) Int. Cl. A61K 31/7088; C07H 21/04; A61P 43/00

(52) U.S. Cl. 514/44 A; 536/24.5

(57) ABSTRACT

The present invention concerns methods and reagents useful in modulating gene expression in a variety of applications, including use in therapeutic, cosmetic, cosmeceutical, prophylactic, diagnostic, target validation, and genomic discovery applications. Specifically, the invention relates to synthetic chemically modified small nucleic acid molecules, such as short interfering nucleic acid (siNA), short interfering RNA (siRNA), double-stranded RNA (dsRNA), micro-RNA (miRNA), and short hairpin RNA (shRNA) molecules capable of mediating RNA interference (RNAi) against target nucleic acid sequences. The small nucleic acid molecules are useful in the treatment of disease (e.g., cancer, proliferative, inflammatory, metabolic, autoimmune, neurologic, ocular diseases), condition, trait (e.g., hair growth and removal), genotype and phenotype that responds to modulation of gene expression or activity in a cell, tissue, or organism. Such small nucleic acid molecules can be administered systemically, locally, or topically.

[0001] This application is a continuation of U.S. patent application Ser. No. 10/557,542, filed Jul. 3, 2006, which is a is a National Stage Entry of PCT/USO4/16390, which is a continuation-in-part of U.S. patent application Ser. No. 10/826,966, filed Apr. 16, 2004, which is a continuation-in-part of U.S. patent application Ser. No. 10/757,803, filed Jan. 14, 2004, which is a continuation-inpart of U.S. patent application Ser. No. 10/720,448, filed Nov. 24, 2003, which is a continuation-in-part of U.S. patent application Ser. No. 10/693,059, filed Oct. 23, 2003, which is a continuation-in-part of U.S. patent application Ser. No. 10/444,853, filed May 23, 2003 which is a continuation-in-part of International Patent Application No. PCT/US03/05346, filed Feb. 20, 2003 and International Patent Application No. PCT/US03/05028, filed Feb. 20, 2003, both of which claim the benefit of U.S. Provisional Application No. 60/440,129 filed Jan. 15, 2003, U.S. Provisional Application No. 60/409,293 filed Sep. 9, 2002, U.S. Provisional Application No. 60/408,378 filed Sep. 5, 2002, U.S. Provisional Application No. 60/406,784 filed Aug. 29, 2002, U.S. Provisional Application No. 60/386,782 filed Jun. 6, 2002, U.S. Provisional Application No. 60/363,124 filed Mar. 11, 2002, and U.S. Provisional Application No. 60/358,580 filed Feb. 20, 2002. The instant application claims priority to all of the listed applications, which are hereby incorporated by reference herein in their entireties, including the drawings.

### SEQUENCE LISTING

[0002] The sequence listing submitted via EFS, in compliance with 37 CFR §1.52(e)(5), is incorporated herein by reference. The sequence listing text file submitted via EFS contains the file “SequenceListing1USCNT14,” created on Mar. 26, 2010, which is 465,147 bytes in size.

### FIELD OF THE INVENTION

[0003] The present invention comprises methods and reagents useful in modulating gene expression in a variety of applications, including use in therapeutic, diagnostic, target validation, and genomic discovery applications. Specifically, the invention comprises synthetic small nucleic acid molecules, such as short interfering nucleic acid (siNA), short interfering RNA (siRNA), double-stranded RNA (dsRNA), micro-RNA (miRNA), and short hairpin RNA (shRNA) molecules capable of mediating RNA interference (RNAi).

### BACKGROUND OF THE INVENTION

[0004] The following is a discussion of relevant art pertaining to RNAi. The discussion is provided only for understanding of the invention that follows. The summary is not an admission that any of the work described below is prior art to the claimed invention. Applicant demonstrates herein that chemically modified short interfering nucleic acids possess the same capacity to mediate RNAi as do siRNA molecules and are expected to possess improved stability and activity in vivo; therefore, this discussion is not meant to be limiting only to siRNA and can be applied to siNA as a whole.

[0005] RNA interference refers to the process of sequence-specific post-transcriptional gene silencing in animals mediated by short interfering RNAs (siRNAs) (Zamore et al., 2000, Cell, 101, 25-33; Fire et al., 1998, Nature, 391, 806; Hamilton et al., 1999, Science, 286, 950-951; Lin et al., 1999, Nature, 402, 128-129; and Strauss, 1999, Science, 286, 886). The corresponding process in plants (Heifetz et al., International PCT Publication No. WO 99/61631) is commonly referred to as post-transcriptional gene silencing or RNA silencing and is also referred to as quelling in fungi. The process of post-transcriptional gene silencing is thought to be an evolutionarily-conserved cellular defense mechanism used to prevent the expression of foreign genes and is commonly shared by diverse flora and phyla (Fire et al., 1999, Trends Genet., 15, 358). Such protection from foreign gene expression may have evolved in response to the production of double-stranded RNAs (dsRNAs) derived from viral infection or from the random integration of transposon elements into a host genome via a cellular response that specifically destroys homologous single-stranded

[0006] RNA or viral genomic RNA. The presence of dsRNA in cells triggers the RNAi response through a mechanism that has yet to be fully characterized. This mechanism appears to be different from other known mechanisms involving double stranded RNA-specific ribonucleases, such as the interferon response that results from dsRNA-mediated activation of protein kinase PKR and 2′,5′-oligoadenylate synthetase resulting in non-specific cleavage of mRNA by ribonuclease L (see for example U.S. Pat. Nos. 6,107,094; 5,898,031; Clemens et al., 1997, J. Interferon & Cytokine Res., 17, 503-524; Adah et al., 2001, Curr. Med. Chem., 8, 1189).

[0007] The presence of long dsRNAs in cells stimulates the activity of a ribonuclease III enzyme referred to as dicer (Bass, 2000, Cell, 101, 235; Zamore et al., 2000, Cell, 101, 25-33; Hammond et al., 2000, Nature, 404, 293). Dicer is involved in the processing of the dsRNA into short pieces of dsRNA known as short interfering RNAs (siRNAs) (Zamore et al., 2000, Cell, 101, 25-33; Bass, 2000, Cell, 101, 235; Berstein et al., 2001, Nature, 409, 363). Short interfering RNAs derived from dicer activity are typically about 21 to about 23 nucleotides in length and comprise about 19 base pair duplexes (Zamore et al., 2000, Cell, 101, 25-33; Elbashir et al., 2001, Genes Dev., 15, 188). Dicer has also been implicated in the excision of 21- and 22-nucleotide small temporal RNAs (stRNAs) from precursor RNA of conserved structure that are implicated in translational control (Hutvagner et al., 2001, Science, 293, 834). The RNAi response also features an endonuclease complex, commonly referred to as an RNA-induced silencing complex (RISC), which mediates cleavage of single-stranded RNA having sequence complementary to the antisense strand of the siRNA duplex. Cleavage of the target RNA takes place in the middle of the region complementary to the antisense strand of the siRNA duplex (Elbashir et al., 2001, Genes Dev., 15, 188).

[0008] RNAi has been studied in a variety of systems. Fire et al., 1998, Nature, 391, 806, were the first to observe RNAi in C. elegans. Bahramian and Zarbl, 1999, Molecular and Cellular Biology, 19, 274-283 and Wianny and Goetz, 1999, Nature Cell Biol., 2, 70, describe RNAi mediated by dsRNA in mammalian systems. Hammond et al., 2000, Nature, 404, 293, describe RNAi in Drosophila cells transfected with dsRNA. Elbashir et al., 2001, Nature, 411, 494 and Tuschl et al., International PCT Publication No. WO 01/75164, describe RNAi induced by introduction of duplexes of synthetic 21-nucleotide RNAs in cultured mammalian cells including human embryonic kidney and HeLa cells. Recent work in Drosophila embryonic lysates (Elbashir et al., 2001, EMBO J., 20, 6877 and Tuschl et al., International PCT Publication No. WO 01/75164) has revealed certain requirements for siRNA length, structure, chemical composition, and sequence that are essential to mediate efficient RNAi activity. These studies have shown that 21-nucleotide siRNA duplexes are most active when containing 3′-terminal dinucleotide overhangs. Furthermore, complete substitution of one or both siRNA strands with 2′-deoxy (2′-H) or 2′-O-methyl nucleotides abolishes RNAi activity, whereas substitution of the 3′-terminal siRNA overhang nucleotides with 2′-deoxy nucleotides (2′-H) was shown to be tolerated. Single mismatch sequences in the center of the siRNA duplex were also shown to abolish RNAi activity. In addition, these studies also indicate that the position of the cleavage site in the target RNA is defined by the 5′-end of the siRNA guide sequence rather than the 3′-end of the guide sequence (Elbashir et al., 2001, EMBO J., 20, 6877). Other studies have indicated that a 5′-phosphate on the target-complementary strand of a siRNA duplex is required for siRNA activity and that ATP is utilized to maintain the 5′-phosphate moiety on the siRNA (Nykanen et al., 2001, Cell, 107, 309).

[0009] Studies have shown that replacing the 3′-terminal nucleotide overhanging segments of a 21-mer siRNA duplex having two-nucleotide 3′-overhangs with deoxyribonucleotides does not have an adverse effect on RNAi activity. Replacing up to four nucleotides on each end of the siRNA with deoxyribonucleotides has been reported to be well tolerated, whereas complete substitution with deoxyribonucleotides results in no RNAi activity (Elbashir et al., 2001, EMBO J., 20, 6877 and Tuschl et al., International PCT Publication No. WO 01/75164). In addition, Elbashir et al., supra, also report that substitution of siRNA with 2′-O-methyl nucleotides completely abolishes RNAi activity. Li et al., International PCT Publication No. WO 00/44914, and Beach et al., International PCT Publication No. WO 01/68836 preliminarily suggest that siRNA may include modifications to either the phosphate-sugar backbone or the nucleoside to include at least one of a nitrogen or sulfur heteroatom, however, neither application postulates to what extent such modifications would be tolerated in siRNA molecules, nor provides any further guidance or examples of such modified siRNA. Kreutzer et al., Canadian Patent Application No. 2,359,180, also describe certain chemical modifications for use in dsRNA constructs in order to counteract activation of double-stranded RNA-dependent protein kinase PKR, specifically 2′-amino or 2′-O-methyl nucleotides, and nucleotides containing a 2′-O or 4′-C methylene bridge. However, Kreutzer et al. similarly fails to provide examples or guidance as to what extent these modifications would be tolerated in dsRNA molecules.

[0010] Parrish et al., 2000, Molecular Cell, 6, 1077-1087, tested certain chemical modifications targeting the unc-22 gene in C. elegans using long (>25 nt) siRNA transcripts. The authors describe the introduction of thiophosphate residues into these siRNA transcripts by incorporating thiophosphate nucleotide analogs with T7 and T3 RNA polymerase and observed that RNAs with two phosphorothioate modified bases also had substantial decreases in effectiveness as RNAi. Further, Parrish et al. reported that phosphorothioate modification of more than two residues greatly destabilized the RNAs in vitro such that interference activities could not be assayed. Id. at 1081. The authors also tested certain modifications at the 2′-position of the nucleotide sugar in the long siRNA transcripts and found that substituting deoxynucleotides for ribonucleotides produced a substantial decrease in interference activity, especially in the case of Uridine to Thymidine and/or Cytidine to deoxy-Cytidine substitutions. Id. In addition, the authors tested certain base modifications, including substituting, in sense and antisense strands of the siRNA, 4-thiouracil, 5-bromouracil, 5-iodouracil, and 3-(aminoallyl)uracil for uracil, and inosine for guanosine. Whereas 4-thiouracil and 5-bromouracil substitution appeared to be tolerated, Parrish reported that inosine produced a substantial decrease in interference activity when incorporated in either strand. Parrish also reported that incorporation of 5-iodouracil and 3-(aminoallyl)uracil in the antisense strand resulted in a substantial decrease in RNAi activity as well.

[0011] The use of longer dsRNA has been described. For example, Beach et al., International PCT Publication No. WO 01/68836, describes specific methods for attenuating gene expression using endogenously-derived dsRNA. Tuschl et al., International PCT Publication No. WO 01/75164, describe a Drosophila in vitro RNAi system and the use of specific siRNA molecules for certain functional genomic and certain therapeutic applications; although Tuschl, 2001, Chem. Biochem., 2, 239-245, doubts that RNAi can be used to cure genetic diseases or viral infection due to the danger of activating interferon response. Li et al., International PCT Publication No. WO 00/44914, describe the use of specific long (141 bp-488 bp) enzymatically synthesized or vector expressed dsRNAs for attenuating the expression of certain target genes. Zernicka-Goetz et al., International PCT Publication No. WO 01/36646, describe certain methods for inhibiting the expression of particular genes in mammalian cells using certain long (550 bp-714 bp), enzymatically synthesized or vector expressed dsRNA molecules. Fire et al., International PCT Publication No. WO 99/32619, describe particular methods for introducing certain long dsRNA molecules into cells for use in inhibiting gene expression in nematodes. Plaetinck et al., International PCT Publication No. WO 00/01846, describe certain methods for identifying specific genes responsible for conferring a particular phenotype in a cell using specific long dsRNA molecules. Mello et al., International PCT Publication No. WO 01/29058, describe the identification of specific genes involved in dsRNA-mediated RNAi. Pachuck et al., International PCT Publication No. WO 00/63364, describe certain long (at least 200 nucleotide) dsRNA constructs. Deschamps Depaillette et al., International PCT Publication No. WO 99/07409, describe specific compositions consisting of particular dsRNA molecules combined with certain anti-viral agents. Waterhouse et al., International PCT Publication No. 99/53050 and 1998, PNAS, 95, 13959-13964, describe certain methods for decreasing the phenotypic expression of a nucleic acid in plant cells using certain dsRNAs. Driscoll et al., International PCT Publication No. WO 01/49844, describe specific DNA expression constructs for use in facilitating gene silencing in targeted organisms.

[0012] Others have reported on various RNAi and gene-silencing systems. For example, Parrish et al., 2000, Molecular Cell, 6, 1077-1087, describe specific chemically-modified dsRNA constructs targeting the unc-22 gene of C. elegans. Grossniklaus, International PCT Publication No. WO 01/38551, describes certain methods for regulating polycomb gene expression in plants using certain dsRNAs. Churikov et al., International PCT Publication No. WO 01/42443, describe certain methods for modifying genetic characteristics of an organism using certain dsRNAs. Cogoni et al., International PCT Publication No. WO 01/53475, describe certain methods for isolating a Neurospora silencing gene and uses thereof. Reed et al., International PCT Publication No. WO 01/68836, describe certain methods for gene silencing in plants. Honer et al., International PCT Publication No. WO 01/70944, describe certain methods of drug screening using transgenic nematodes as Parkinson's Disease models using certain dsRNAs. Deak et al., International PCT Publication No. WO 01/72774, describe certain Drosophila-derived gene products that may be related to RNAi in Drosophila. Arndt et al., International PCT Publication No. WO 01/92513 describe certain methods for mediating gene suppression by using factors that enhance RNAi. Tuschl et al., International PCT Publication No. WO 02/44321, describe certain synthetic siRNA constructs. Pachuk et al., International PCT Publication No. WO 00/63364, and Satishchandran et al., International PCT Publication No. WO 01/04313, describe certain methods and compositions for inhibiting the function of certain polynucleotide sequences using certain long (over 250 bp), vector expressed dsRNAs. Echeverri et al., International PCT Publication No. WO 02/38805, describe certain C. elegans genes identified via RNAi. Kreutzer et al., International PCT Publications Nos. WO 02/055692, WO 02/055693, and EP 1144623 B1 describes certain methods for inhibiting gene expression using dsRNA. Graham et al., International PCT Publications Nos. WO 99/49029 and WO 01/70949, and AU 4037501 describe certain vector expressed siRNA molecules. Fire et al., U.S. Pat. No. 6,506,559, describe certain methods for inhibiting gene expression in vitro using certain long dsRNA (299 bp-1033 bp) constructs that mediate RNAi. Martinez et al., 2002, Cell, 110, 563-574, describe certain single stranded siRNA constructs, including certain 5′-phosphorylated single stranded siRNAs that mediate RNA interference in Hela cells. Harborth et al., 2003, Antisense & Nucleic Acid Drug Development, 13, 83-105, describe certain chemically and structurally modified siRNA molecules. Chiu and Rana, 2003, RNA, 9, 1034-1048, describe certain chemically and structurally modified siRNA molecules. Woolf et al., International PCT Publication Nos. WO 03/064626 and WO 03/064625 describe certain chemically modified dsRNA constructs.

### SUMMARY OF THE INVENTION

[0013] This invention comprises compounds, compositions, and methods useful for modulating RNA function and/or gene expression in a cell. Specifically, the instant invention features synthetic small nucleic acid molecules, such as short interfering nucleic acid (siNA), short interfering RNA (siRNA), double-stranded RNA (dsRNA), micro-RNA (miRNA), and short hairpin RNA (shRNA) molecules capable of modulating gene expression in cells by RNA inference (RNAi). The siNA molecules of the invention can be chemically modified. The use of chemically modified siNA can improve various properties of native siRNA molecules through increased resistance to nuclease degradation in vivo and/or improved cellular uptake. The chemically modified siNA molecules of the instant invention provide useful reagents and rnethodsfor a variety of therapeutic, cosmetic, cosmeceutical, prophylactic, diagnostic, agricultural, target validation, genomic discovery, genetic engineering and pharmacogenomic applications.

[0014] In one embodiment, the invention features compounds, compositions, and methods useful for modulating the expression of genes associated with the maintenance or development of a disease, condition, or trait in a cell, organism, or subject, for example genes and variants thereof, including polymorphic variants such as single nucleotide polymorphism (SNP) variants associated with one or more diseases, conditions, or traits using short interfering nucleic acid (siNA) molecules. This invention als_{o r}elates to compounds, compositions, and methods useful for modulating the expression and activity of genes associated with the maintenance or development of a disease, condition, or trait in a cell, organism, or subject by RNA interference (RNAi) using small nucleic acid molecules. In particular, the instant invention features small nucleic acid molecules, such as short interfering nucleic acid (siNA), short interfering RNA (siRNA), double-stranded RNA (dsRNA), micro-RNA (miRNA), and short hairpin RNA (shRNA) molecules and methods used to modulate the expression of genes and/or gene alleles associated with the development or maintenance of a disease, condition, or trait in a cell, organism, or subject.

[0015] In a non-limiting example, the introduction of chemically modified nucleotides into nucleic acid molecules provides a powerful tool in overcoming potential limitations of in vivo stability and bioavailability inherent to native RNA molecules that are delivered exogenously. For example, the use of chemically modified nucleic acid molecules can enable a lower dose of a particular nucleic acid molecule for a given therapeutic effect since chemically modified nucleic acid molecules tend to have a longer half-life in serum. Furthermore, certain chemical modifications can improve the bioavailability of nucleic acid molecules by targeting particular cells or tissues and/or improving cellular uptake of the nucleic acid molecule. Therefore, even if the activity of a chemically modified nucleic acid molecule is reduced as compared to a native nucleic acid molecule, for example when compared to an all RNA nucleic acid molecule, the overall activity of the modified nucleic acid molecule can be greater than the native molecule due to improved stability and/or delivery of the molecule. Unlike native unmodified siRNA, chemically modified siNA can also minimize the possibility of activating interferon activity in humans.

[0016] In one embodiment, the invention features one or more siNA molecules and methods that independently or in combination modulate the expression of genes encoding proteins that are associated with the maintenance and/or development of a disease, condition, or trait in a cell, organism, or subject, Such genes include those encoding sequences comprising those sequences referred to by GenBank Accession Nos. described herein and in Table V of PCT/US03/05028 (International PCT Publication No. WO 03/74654), all of which genes are included within in the defintion of gene(s) herein. The description below of the various aspects and embodiments of the invention is provided with reference to such exemplary genes. However, the various aspects and embodiments are also directed to other genes, such as gene mutations, althernative splice variants, allelic variants and polymorphisms such as single nucleotide polymorphisms (SNPs) associated with the development or maintenance of a disease, condition, or trait in a cell, organism, or subject. These additional genes can be analyzed for target sites using the methods generally described for genes herein. Thus, the modulation of other genes and the effects of such modulation of the other genes can be performed, determined, and measured as described herein.

[0017] In one embodiment, the invention features a double-stranded short interfering nucleic acid (siNA) molecule that down-regulates expression of a gene, wherein said siNA molecule comprises about 19 to about 21 base pairs.

[0018] In one embodiment, the invention features a siNA molecule that down-regulates expression of a gene, for example, wherein the gene comprises a protein encoding sequence. In one embodiment, the invention features a siNA molecule that down-regulates expression of a gene, for example, wherein the gene comprises non-coding sequence or regulatory elements involved in gene expression.

[0019] In one embodiment, the invention features a siNA molecule having RNAi activity against a RNA, wherein the siNA molecule comprises a sequence complementary to any RNA having coding or non-encoding sequence, such as those sequences having GenBank Accession Nos. shown in Table I or sequences referred to by GenBank Accession Nos. described herein and in Table V of PCT/US03/05028 (International PCT Publication No. WO 03/74654) or otherwise known in the art. In another embodiment, the invention features a siNA molecule having RNAi activity against a RNA, wherein the siNA molecule comprises a sequence complementary to an RNA having variant (e.g., mutant, polymorphism, alternative splice variant) encoding sequence, for example other mutant genes not shown in Table I but known in the art to be associated with the maintenance and/or development of a disease, condition, or trait. Chemical modifications as shown in Tables III and IV or otherwise described herein can be applied to any siNA construct of the invention. In another embodiment, a siNA molecule of the invention includes a nucleotide sequence that can interact with nucleotide sequence of a gene and thereby mediate silencing of gene expression, for example, wherein the siNA mediates regulation of gene expression by cellular processes that modulate the chromatin structure or methylation patterns of the gene and prevent transcription of the gene.

[0020] In one embodiment, the nucleic acid molecules of the invention that act as mediators of the RNA interference gene silencing response are chemically modified double stranded nucleic acid molecules. As in their native double stranded RNA counterparts, these siNA molecules typically consist of duplexes containing about 19 base pairs between oligonucleotides comprising about 19 to about 25 nucleotides. The most active siRNA molecules are thought to have such duplexes with overhanging ends of 1-3 nucleotides, for example 21 nucleotide duplexes with 19 base pairs and 2 nucleotide 3′-overhangs. These overhanging segments are readily hydrolyzed by endonucleases in vivo. Studies have shown that replacing the 3′-overhanging segments of a 21-mer siRNA duplex having 2 nucleotide 3′ overhangs with deoxyribonucleotides does not have an adverse effect on RNAi activity. Replacing up to 4 nucleotides on each end of the siRNA with deoxyribonucleotides has been reported to be well tolerated whereas complete substitution with deoxyribonucleotides results in no RNAi activity (Elbashir et al., 2001, EMBO J., 20, 6877). In addition, Elbashir et al, supra, also report that substitution of siRNA with 2′-O-methyl nucleotides completely abolishes RNAi activity. Li et al., International PCT Publication No. WO 00/44914, and Beach et al., International PCT Publication No. WO 01/68836 both suggest that siRNA may include modifications to either the phosphate-sugar back bone or the nucleoside to include at least one of a nitrogen or sulfur heteroatom, however neither application teaches to what extent these modifications are tolerated in siRNA molecules nor provide any examples of such modified siRNA. Kreutzer and Limmer, Canadian Patent Application No. 2,359,180, also describe certain chemical modifications for use in dsRNA constructs in order to counteract activation of double stranded-RNA-dependent protein kinase PKR, specifically 2′-amino or 2′-O-methyl nucleotides, and nucleotides containing a 2′-O or 4′-C methylene bridge. However, Kreutzer and Limmer similarly fail to show to what extent these modifications are tolerated in siRNA molecules nor provide any examples of such modified siRNA.

[0021] In one embodiment, the invention features chemically modified siNA constructs having specificity for target nucleic acid molecules in a cell. Non-limiting examples of such chemical modifications include without limitation phosphorothioate internucleotide linkages, 2′-O-methyl ribonucleotides, 2′-deoxy-2′-fluoro ribonucleotides, 2′-deoxy ribonucleotides, “universal base” nucleotides, 5-C-methyl nucleotides, and inverted deoxyabasic residue incorporation. These chemical modifications, when used in various siNA constructs, are shown to preserve RNAi activity in cells while at the same time, dramatically increasing the serum stability of these compounds. Furthermore, contrary to the data published by Parrish et al., supra, applicant demonstrates that multiple (greater than one) phosphorothioate substitutions are well-tolerated and confer substantial increases in serum stability for modified siNA constructs.

[0022] In one embodiment, the chemically-modified siNA molecules of the invention comprise a duplex having two strands, one or both of which can be chemically-modified, wherein each strand is about 19 to about 29 (e.g., about 18, 19, 20, 21, 22, 23, 24, 25, 26, 27, 28, 29 or 30) nucleotides. In one embodiment, the chemically-modified siNA molecules of the invention comprise a duplex having two strands, one or both of which can be chemically-modified, wherein each strand is about 19 to about 23 (e.g., about 18, 19, 20, 21, 22, 23 or 24) nucleotides. In one embodiment, a siNA molecule of the invention comprises modified nucleotides while maintaining the ability to mediate RNAi. The modified nucleotides can be used to improve in vitro or in vivo characteristics such as stability, activity, and/or bioavailability. For example, a siNA molecule of the invention can comprise modified nucleotides as a percentage of the total number of nucleotides present in the siNA molecule. As such, a siNA molecule of the invention can generally comprise modified nucleotides from about 5 to about 100% of the nucleotide positions (e.g., 5%, 10%, 15%, 20%, 25%, 30%, 35%, 40%, 45%, 50%, 55%, 60%, 65%, 70%, 75%, 80%, 85%, 90%, 95% or 100% of the nucleotide positions). The actual percentage of modified nucleotides present in a given siNA molecule depends on the total number of nucleotides present in the siNA. If the siNA molecule is single stranded, the percent modification can be based upon the total number of nucleotides present in the single stranded siNA molecules. Likewise, if the siNA molecule is double stranded, the percent modification can be based upon the total number of nucleotides present in the sense strand, antisense strand, or both the sense and antisense strands. In addition, the actual percentage of modified nucleotides present in a given siNA molecule can also depend on the total number of purine and pyrimidine nucleotides present in the siNA, for example, wherein all pyrimidine nucleotides and/or all purine nucleotides present in the siNA molecule are modified.

[0023] The antisense region of a siNA molecule of the invention can comprise a phosphorothioate intemucleotide linkage at the 3′-end of said antisense region. The antisense region can comprise about one to about five phosphorothioate intemucleotide linkages at the 5′-end of said antisense region. The 3′-terminal nucleotide overhangs of a siNA molecule of the invention can comprise ribonucleotides or deoxyribonucleotides that are chemically-modified at a nucleic acid sugar, base, or backbone. The 3′-terminal nucleotide overhangs can comprise one or more universal base ribonucleotides. The 3′-terminal nucleotide overhangs can comprise one or more acyclic nucleotides. The 3′-terminal nucleotide overhangs can comprise one or more cap moieties, such as cap moieties shown in FIG. 22.

[0024] In one embodiment, a siNA molecule of the invention comprises blunt ends, i.e., the ends do not include any overhanging nucleotides. For example, a siNA molecule of the invention comprising modifications described herein (e.g., comprising nucleotides having Formulae or siNA constructs comprising “Stab00”-“Stab25” (Table IV) or any combination thereof) and/or any length described herein can comprise blunt ends or ends with no overhanging nucleotides.

[0025] In one embodiment, any siNA molecule of the invention can comprise one or more blunt ends, i.e. where a blunt end does not have any overhanging nucleotides. In a non-limiting example, a blunt ended siNA molecule has a number of base pairs equal to the number of nucleotides present in each strand of the siNA molecule. In another example, a siNA molecule comprises one blunt end, for example wherein the 5′-end of the antisense strand and the 3′-end of the sense strand do not have any overhanging nucleotides. In another example, a siNA molecule comprises one blunt end, for example wherein the 3′-end of the antisense strand and the 5′-end of the sense strand do not have any overhanging nucleotides. In another example, a siNA molecule comprises two blunt ends, for example wherein the 3′-end of the antisense strand and the 5′-end of the sense strand as well as the 5′-end of the antisense strand and 3′-end of the sense strand do not have any overhanging nucleotides. A blunt ended siNA molecule can comprise, for example, from about 18 to about 30 nucleotides (e.g., about 18, 18, 19, 20, 21, 22, 23, 24, 25, 26, 27, 28, 29, or 30 nucleotides). Other nucleotides present in a blunt ended siNA molecule can comprise mismatches, bulges, loops, or wobble base pairs, for example, to modulate the activity of the siNA molecule to mediate RNA interference.

[0026] By “blunt ends” is meant symmetric termini or termini of a double stranded siNA molecule having no overhainging nucleotides. The two strands of a double stranded siNA molecule align with each other without over-hanging nucleotides at the termini. For example, a blunt ended siNA construct comprises terminal nucleotides that are complimentary between the sense and antisense regions of the siNA molecule.

[0027] In one embodiment, the invention features the use of a double-stranded short interfering nucleic acid (siNA) molecule to down-regulate expression of a target gene, wherein the siNA molecule comprises one or more chemical modifications and each strand of the double-stranded siNA is about 19 to about 23 nucleotides (e.g., about 19, 20, 21, 22, or 23 nucleotides) long.

[0028] In one embodiment, the invention features a double-stranded short interfering nucleic acid (siNA) molecule that down-regulates expression of a target gene, wherein the siNA molecule comprises no ribonucleotides and each strand of the double-stranded siNA comprises about 19 to about 23 nucleotides (e.g., about 19, 20, 21, 22, or 23 nucleotides).

[0029] In one embodiment, one of the strands of a double-stranded siNA molecule of the invention comprises a nucleotide sequence that is complementary to a nucleotide sequence or a portion thereof of a target gene, and wherein the second strand of a double-stranded siNA molecule comprises a nucleotide sequence substantially similar to the nucleotide sequence or a portion thereof of the target gene.

[0030] In one embodiment, a siNA molecule of the invention comprises about 19 to about 23 nucleotides (e.g., about 19, 20, 21, 22, or 23 nucleotides), and each strand comprises at least about 19 nucleotides that are complementary to the nucleotides of the other strand.

[0031] In one embodiment, a siNA molecule of the invention comprises an antisense region comprising a nucleotide sequence that is complementary to a nucleotide sequence or a portion thereof of a target gene, and the siNA further comprises a sense region, wherein the sense region comprises a nucleotide sequence substantially similar to the nucleotide sequence or a portion thereof of the target gene. The antisense region and the sense region each comprise about 19 to about 23 nucleotides (e.g., about 19, 20, 21, 22, or 23 nucleotides), and the antisense region comprises at least about 19 nucleotides that are complementary to nucleotides of the sense region.

[0032] In one embodiment, a siNA molecule of the invention comprises a sense region and an antisense region, wherein the antisense region comprises a nucleotide sequence that is complementary to a nucleotide sequence or a portion thereof of RNA encoded by a target gene and the sense region comprises a nucleotide sequence that is complementary to the antisense region.

[0033] In one embodiment, a siNA molecule of the invention is assembled from two separate oligonucleotide fragments wherein one fragment comprises the sense region and the second fragment comprises the antisense region of the siNA molecule. In another embodiment, the sense region is connected to the antisense region via a linker molecule, which can be a polynucleotide linker or a non-nucleotide linker.

[0034] In one embodiment, a siNA molecule of the invention comprises a sense region and antisense region, wherein pyrimidine nucleotides in the sense region compries 2′-O-methyl pyrimidine nucleotides and purine nucleotides in the sense region comprise 2′-deoxy purine nucleotides. In one embodiment, a siNA molecule of the invention comprises a sense region and antisense region, wherein pyrimidine nucleotides present in the sense region comprise 2′-deoxy-2′-fluoro pyrimidine nucleotides and wherein purine nucleotides present in the sense region comprise 2′-deoxy purine nucleotides.

[0035] In one embodiment, a siNA molecule of the invention comprises a sense region and antisense region, wherein the pyrimidine nucleotides when present in said antisense region are 2′-deoxy-2′-fluoro pyrimidine nucleotides and the purine nucleotides when present in said antisense region are 2′-O-methyl purine nucleotides.

[0036] In one embodiment, a siNA molecule of the invention comprises a sense region and antisense region, wherein the pyrimidine nucleotides when present in said antisense region are 2′-deoxy-2′-fluoro pyrimidine nucleotides and wherein the purine nucleotides when present in said antisense region comprise 2′-deoxy-purine nucleotides.

[0037] In one embodiment, a siNA molecule of the invention comprises a sense region and antisense region, wherein the sense region includes a terminal cap moiety at the 5′-end, the 3′-end, or both of the 5′ and 3′ ends of the sense region. In another embodiment, the terminal cap moiety is an inverted deoxy abasic moiety or any other cap moiety such as those shown in FIG. 22.

[0038] In one embodiment, a siNA molecule of the invention has RNAi activity that modulates expression of RNA encoded by a gene. Because many genes can share some degree of sequence homology with each other, siNA molecules can be designed to target a class of genes (and associated receptor or ligand genes) or alternately specific genes by selecting sequences that are either shared amongst different gene targets or alternatively that are unique for a specific gene target. Therefore, in one embodiment, the siNA molecule can be designed to target conserved regions of a RNA sequence having sequence homology between several genes so as to target several genes or gene families (e.g., different gene isoforms, splice variants, mutant genes etc.) with one siNA molecule. In another embodiment, the siNA molecule can be designed to target a sequence that is unique to a specific RNA sequence of a specific gene due to the high degree of specificity that the siNA molecule requires to mediate RNAi activity.

[0039] In one embodiment, a siNA of the invention is used to inhibit the expression of genes or a gene family, wherein the genes or gene family sequences share sequence homology. Such homologous sequences can be identified as is known in the art, for example using sequence alignments. siNA molecules can be designed to target such homologous sequences, for example using perfectly complementary sequences or by incorporating non-canonical base pairs (e.g., mismatches and/or wobble base pairs, that can provide additional target sequences. In instances where mismatches are identified, non-canonical base pairs (e.g., mismatches and/or wobble bases) can be used to generate siNA molecules that target more than one gene sequence. In a non-limiting example, non-canonical base pairs such as UU and CC base pairs are used to generate siNA molecules that are capable of targeting differing VEGF and/or VEGFR sequences (e.g., VEGFR1 and VEGFR2). As such, one advantage of using siNAs of the invention is that a single siNA can be designed to include a nucleic acid sequence that is complementary to the nucleotide sequence that is conserved between the VEGF receptors (i.e., VEGFR1, VEGFR2, and/or VEGFR3) such that the siNA can interact with RNAs of the receptors and mediate RNAi to achieve inhibition of expression of the VEGF receptors. In this approach, a single siNA can be used to inhibit expression of more than one VEGF receptor instead of using more than one siNA molecule to target the different receptors.

[0040] In one embodiment, the invention features a siNA molecule having RNAi activity against a target RNA, wherein the siNA molecule comprises a sequence complementary to any RNA having target gene encoding sequence, such as those sequences having GenBank Accession Nos. referred to herein. In another embodiment, the invention features a siNA molecule having RNAi activity against a target RNA, wherein the siNA molecule comprises a sequence complementary to an RNA having other sequences, for example mutant genes as are known in the art to be associated with a disease, condition, trait, genotype or phenotype. Chemical modifications as shown in Tables I and IV or otherwise described herein can be applied to any siNA construct of the invention. In another embodiment, a siNA molecule of the invention includes nucleotide sequence that can interact with nucleotide sequence of a target gene and thereby mediate silencing of target gene expression, for example, wherein the siNA mediates regulation of target gene expression by cellular processes that modulate the chromatin structure or methylation patterns of the target gene and prevent transcription of the target gene.

[0041] In one embodiment, siNA molecules of the invention are used to down regulate or inhibit the expression of target proteins arising from haplotype polymorphisms that are associated with a disease, condition, trait, genotype or phenotype, (e.g., associated with a gain of function). Analysis of target genes, or target protein or RNA levels can be used to identify subjects with such polymorphisms or those subjects who are at risk of developing a disease, condition, trait, genotype or phenotype. These subjects are amenable to treatment, for example, treatment with siNA molecules of the invention and any other composition useful in treating a diseases, conditions, traits, genotypes or phenotypes related to target gene expression or expressed protein activity. As such, analysis of target protein or RNA levels can be used to determine treatment type and the course of therapy in treating a subject. Monitoring of protein or RNA levels can be used to predict treatment outcome and to determine the efficacy of compounds and compositions that modulate the level and/or activity of certain proteins associated with a disease, condition, trait, genotype or phenotype.

[0042] In one embodiment, the antisense region of a siNA molecule of the invention comprises sequence complementary to a portion of a gene transcript having sequence unique to a particular disease, condition, trait, genotype or phenotype related allele, such as sequence comprising a SNP associated with the disease, condition, trait, genotype or phenotype specific allele. As such, the antisense region of a siNA molecule of the invention can comprise sequence complementary to sequences that are unique to a particular allele to provide specificity in mediating selective RNAi againt the disease, condition, trait, genotype or phenotype related allele.

[0043] In another embodiment, the invention features a siNA molecule comprising nucleotide sequence, for example, nucleotide sequence in the antisense region of the siNA molecule that is complementary to a nucleotide sequence or portion of sequence of a target gene. In another embodiment, the invention features a siNA molecule comprising a region, for example, the antisense region of the siNA construct, complementary to a sequence comprising a target gene sequence or a portion thereof.

[0044] In one embodiment of the invention a siNA molecule comprises an antisense strand having about 19 to about 29 (e.g., about 19, 20, 21, 22, 23, 24, 25, 26, 27, 28, or 29) nucleotides, wherein the antisense strand is complementary to a RNA sequence encoding a target protein, and wherein said siNA further comprises a sense strand having about 19 to about 29 (e.g., about 19, 20, 21, 22, 23, 24, 25, 26, 27, 28, or 29) nucleotides, and wherein said sense strand and said antisense strand are distinct nucleotide sequences with at least about 19 complementary nucleotides.

[0045] In another embodiment of the invention a siNA molecule of the invention comprises an antisense region having about 19 to about 29 (e.g., about 19, 20, 21, 22, 23, 24, 25, 26, 27, 28, or 29) nucleotides, wherein the antisense region is complementary to a RNA sequence encoding a target protein, and wherein said siNA further comprises a sense region having about 19 to about 29 or more (e.g., about 19, 20, 21, 22, 23, 24, 25, 26, 27, 28, 29 or more) nucleotides, wherein said sense region and said antisense region comprise a linear molecule with at least about 19 complementary nucleotides.

[0046] In one embodiment of the invention a siNA molecule comprises an antisense strand comprising a nucleotide sequence that is complementary to a nucleotide sequence or a portion thereof encoding a target protein. The siNA further comprises a sense strand, wherein said sense strand comprises a nucleotide sequence of a target gene or a portion thereof.

[0047] In another embodiment, a siNA molecule comprises an antisense region comprising a nucleotide sequence that is complementary to a nucleotide sequence encoding a target protein or a portion thereof. The siNA molecule further comprises a sense region, wherein said sense region comprises a nucleotide sequence of a target gene or a portion thereof.

[0048] In one embodiment, a siNA molecule of the invention has RNAi activity that modulates expression of RNA encoded by a target gene. Because certain genes can share some degree of sequence homology with each other, siNA molecules can be designed to target a class of genes or alternately specific genes (e.g., polymorphic variants) by selecting sequences that are either shared amongst different targets or alternatively that are unique for a specific target. Therefore, in one embodiment, the siNA molecule can be designed to target conserved regions of RNA sequence having homology between several gene variants so as to target a class of genes with one siNA molecule. Accordingly, in one embodiment, the siNA molecule of the invention modulates the expression of one or both alleles of a target gene in a subject. In another embodiment, the siNA molecule can be designed to target a sequence that is unique to a specific target RNA sequence (e.g., a single allele or associated SNP) due to the high degree of specificity that the siNA molecule requires to mediate RNAi activity.

[0049] In one embodiment, nucleic acid molecules of the invention that act as mediators of the RNA interference gene silencing response are double-stranded nucleic acid molecules. In another embodiment, the siNA molecules of the invention consist of duplexes containing about 19 base pairs between oligonucleotides comprising about 19 to about 25 (e.g., about 19, 20, 21, 22, 23, 24, or 25) nucleotides. In yet another embodiment, siNA molecules of the invention comprise duplexes with overhanging ends of about about 1 to about 3 (e.g., about 1, 2, or 3) nucleotides, for example, about 21-nucleotide duplexes with about 19 base pairs and 3′-terminal mononucleotide, dinucleotide, or trinucleotide overhangs.

[0050] One aspect of the invention features a double-stranded short interfering nucleic acid (siNA) molecule that down-regulates expression of a target gene. In one embodiment, a double stranded siNA molecule comprises one or more chemical modifications and each strand of the double-stranded siNA is about 21 nucleotides long. In one embodiment, the double-stranded siNA molecule does not contain any ribonucleotides. In another embodiment, the double-stranded siNA molecule comprises one or more ribonucleotides. In one embodiment, each strand of the double-stranded siNA molecule comprises about 19 to about 29 (e.g., about 19, 20, 21, 22, 23, 24, 25, 26, 27, 28, or 29) nucleotides, wherein each strand comprises about 19 nucleotides that are complementary to the nucleotides of the other strand. In one embodiment, one of the strands of the double-stranded siNA molecule comprises a nucleotide sequence that is complementary to a nucleotide sequence or a portion thereof of the target gene, and the second strand of the double-stranded siNA molecule comprises a nucleotide sequence substantially similar to the nucleotide sequence of the target gene or a portion thereof.

[0051] In another embodiment, the invention features a double-stranded short interfering nucleic acid (siNA) molecule that down-regulates expression of a target gene comprising an antisense region, wherein the antisense region comprises a nucleotide sequence that is complementary to a nucleotide sequence of the target gene or a portion thereof, and a sense region, wherein the sense region comprises a nucleotide sequence substantially similar to the nucleotide sequence of the target gene or a portion thereof. In one embodiment, the antisense region and the sense region each comprise about 19 to about 23 (e.g., about 19, 20, 21, 22, or 23) nucleotides, wherein the antisense region comprises about 19 nucleotides that are complementary to nucleotides of the sense region.

[0052] In another embodiment, the invention features a double-stranded short interfering nucleic acid (siNA) molecule that down-regulates expression of a target gene comprising a sense region and an antisense region, wherein the antisense region comprises a nucleotide sequence that is complementary to a nucleotide sequence of RNA encoded by the target gene or a portion thereof and the sense region comprises a nucleotide sequence that is complementary to the antisense region.

[0053] In one embodiment, a siNA of the invention is used to inhibit the expression of more than one gene, wherein the genes share some degree of sequence homology. Such homologous sequences can be identified as is known in the art, for example using sequence alignments. siNA molecules can be designed to target such homologous sequences, for example using perfectly complementary sequences or by incorporating mismatches and/or wobble base pairs that can provide additional target sequences One advantage of using siNAs of the invention is that a single siNA can be designed to include nucleic acid sequence that is complementary to a nucleotide sequence that is conserved between the genes such that the siNA can interact with RNA transcripts of the genes and mediate RNAi to achieve inhibition of expression of the genes. In this approach, a single siNA can be used to inhibit expression of more than one gene, thereby obviating the need to use more than one siNA molecule to target the different genes. The different genes can comprise, for example, a cytokine and its corresponding receptor(s).

[0054] In one embodiment, the invention features a method of designing a single siNA to inhibit the expression of two or more genes comprising designing a siNA having nucleotide sequence that is complementary to nucleotide sequence encoded by or present in the genes or a portion thereof, wherein the siNA mediates RNAi to inhibit the expression of the genes. For example, a single siNA can inhibit the expression of two genes by binding to conserved or homologous sequence present in RNA encoded by both genes or a portion thereof.

[0055] In one embodiment, nucleic acid molecules of the invention that act as mediators of the RNA interference gene silencing response are double-stranded nucleic acid molecules. In another embodiment, the siNA molecules of the invention consist of duplexes containing about 19 base pairs between oligonucleotides comprising about 19 to about 25 (e.g., about 19, 20, 21, 22, 23, 24, or 25) nucleotides. In yet another embodiment, siNA molecules of the invention comprise duplexes with overhanging ends of about 1 to about 3 (e.g., about 1, 2, or 3) nucleotides, for example, about 21-nucleotide duplexes with about 19 base pairs and 3′-terminal mononucleotide, dinucleotide, or trinucleotide overhangs.

[0056] In one embodiment, the invention features one or more chemically-modified siNA constructs having specificity for nucleic acid molecules that express or encode a protein sequence, such as RNA or DNA encoding a protein sequence. Non-limiting examples of such chemical modifications include without limitation phosphorothioate internucleotide linkages, 2′-deoxyribonucleotides, 2′-O-methyl ribonucleotides, 2′-deoxy-2′-fluoro ribonucleotides, “universal base” nucleotides, “acyclic” nucleotides, 5-C-methyl nucleotides, and terminal glyceryl and/or inverted deoxy abasic residue incorporation. These chemical modifications, when used in various siNA constructs, are shown to preserve RNAi activity in cells while at the same time, dramatically increasing the serum stability of these compounds.

[0057] In one embodiment, a siNA molecule of the invention does not contain any ribonucleotides. In another embodiment, a siNA molecule of the invention comprises one or more ribonucleotides.

[0058] In one embodiment, the invention features the use of compounds or compositions that inhibit the activity of double stranded RNA binding proteins (dsRBPs, see for example Silhavy et al., 2003, Journal of General Virology, 84, 975-980). Non-limiting examples of compounds and compositions that can be used to inhibit the activity of dsRBPs include but are not limited to small molecules and nucleic acid aptamers that bind to or interact with the dsRBPs and consequently reduce dsRBP activity and/or siNA molecules that target nucleic acid sequences encoding dsRBPs. The use of such compounds and compositions is expected to improve the activity of siNA molecules in biological systems in which dsRBPs can abrogate or suppress the efficacy of siNA mediated RNA interference, such as where dsRBPs are expressed during viral infection of a cell to escape RNAi surveillance. Therefore, the use of agents that inhibit dsRBP activity is preferred in those instances where RNA interference activity can be improved via the abrogation or suppression of dsRBP activity. Such anti-dsRBP agents can be administered alone or can be co-administered with siNA molecules of the invention, or can be used to pretreat cells or a subject before siNA administration. In another embodiment, anti-dsRBP agents are used to treat viral infection, such as HCV, HBV, or HIV infection with or without siNA molecules of the invention.

[0059] In one embodiment, the invention features a double-stranded short interfering nucleic acid (siNA) molecule that down-regulates expression of a gene, wherein one of the strands of the double-stranded siNA molecule comprises a nucleotide sequence that is complementary to a nucleotide sequence of the gene or RNA encoded by the gene or a portion thereof, and wherein the second strand of the double-stranded siNA molecule comprises a nucleotide sequence substantially similar to the nucleotide sequence of the gene or RNA encoded by the gene or a portion thereof.

[0060] In one embodiment, the invention features a double-stranded short interfering nucleic acid (siNA) molecule that down-regulates expression of a gene, wherein each strand of the siNA molecule comprises about 19 to about 23 nucleotides, and wherein each strand comprises at least about 19 nucleotides that are complementary to the nucleotides of the other strand.

[0061] In one embodiment, the invention features a double-stranded short interfering nucleic acid (siNA) molecule that down-regulates expression of a gene, wherein the siNA molecule comprises an antisense region comprising a nucleotide sequence that is complementary to a nucleotide sequence of the gene or RNA encoded by the gene or a portion thereof, and wherein the siNA further comprises a sense region, wherein the sense region comprises a nucleotide sequence substantially similar to the nucleotide sequence of the gene or RNA encoded by the gene or a portion thereof.

[0062] In one embodiment, the invention features a double-stranded short interfering nucleic acid (siNA) molecule that inhibits the expression of a target gene by mediating RNA interference (RNAi) process, wherein the siNA molecule comprises no ribonucleotides and wherein each strand of the double-stranded siNA molecule comprises about 21 nucleotides.

[0063] In one embodiment, the invention features a double-stranded short interfering nucleic acid (siNA) molecule that inhibits the replication of a virus (e.g, as mammalian virus, plant virus, hepatitis C virus, human immunodeficiency virus, hepatitis B virus, herpes simplex virus, cytomegalovirus, human papilloma virus, respiratory syncytial virus, or influenza virus), wherein the siNA molecule does not require the presence of a ribonucleotide within the siNA molecule for the inhibition of replication of the virus and each strand of the double-stranded siNA molecule comprises about 21 nucleotides.

[0064] In one embodiment, the invention features a double-stranded short interfering nucleic acid (siNA) molecule that down-regulates expression of a gene, wherein the siNA molecule comprises a sense region and an antisense region and wherein the antisense region comprises a nucleotide sequence that is complementary to a nucleotide sequence or a portion thereof of RNA encoded by the gene and the sense region comprises a nucleotide sequence that is complementary to the antisense region or a portion thereof, and wherein the purine nucleotides present in the antisense region comprise 2′-deoxy-purine. nucleotides. In another embodiment, the purine nucleotides present in the antisense region comprise 2′-O-methyl purine nucleotides. In either of the above embodiments, the antisense region comprises a phosphorothioate intemucleotide linkage at the 3′ end of the antisense region. In an alternative embodiment, the antisense region comprises a glyceryl modification at the 3′ end of the antisense region. In another embodiment of any of the above described siNA molecules, any nucleotides present in a non-complementary region of the antisense strand (e.g., overhang region) are 2′-deoxy nucleotides.

[0065] In one embodiment, the invention features a double-stranded short interfering nucleic acid (siNA) molecule that down-regulates expression of a gene, wherein the siNA molecule is assembled from two separate oligonucleotide fragments each comprising 21 nucleotides, wherein one fragment comprises the sense region and the second fragment comprises the antisense region of the siNA molecule, and wherein about 19 nucleotides of each fragment of the siNA molecule are base-paired to the complementary nucleotides of the other fragment of the siNA molecule and wherein at least two 3′ terminal nucleotides of each fragment of the siNA molecule are not base-paired to the nucleotides of the other fragment of the siNA molecule. In one embodiment, each of the two 3′ terminal nucleotides of each fragment of the siNA molecule is a 2′-deoxy-pyrimidine nucleotide, such as 2′-deoxy-thymidine. In another embodiment, all 21 nucleotides of each fragment of the siNA molecule are base paired to the complementary nucleotides of the other fragment of the siNA molecule. In another embodiment, about 19 nucleotides of the antisense region are base-paired to the nucleotide sequence or a portion thereof of the RNA encoded by the gene. In another embodiment, 21 nucleotides of the antisense region are base-paired to the nucleotide sequence or a portion thereof of the RNA encoded by the gene. In any of the above embodiments, the 5′-end of the fragment comprising said antisense region can optionally include a phosphate group.

[0066] In one embodiment, the invention features a double-stranded short interfering nucleic acid (siNA) molecule that inhibits the expression of a RNA sequence (e.g., wherein said target RNA sequence is encoded by a gene or a gene involved in a pathway of gene expression), wherein the siNA molecule does not contain any ribonucleotides and wherein each strand of the double-stranded siNA molecule is about 21 nucleotides long. Examples of non-ribonucleotide containing siNA constructs are combinations of stabilization chemistries shown in Table IV in any combination of Sense/Antisense chemistries, e.g., Stab 7/8, Stab 7/11, Stab 8/8, Stab 18/8, Stab 18/11, Stab 12/13, Stab 7/13, Stab 18/13, Stab 7/19, Stab 8/19, Stab 18/19, Stab 7/20, Stab 8/20, or Stab 18/20.

[0067] In one embodiment, the invention features a chemically synthesized double stranded RNA molecule that directs cleavage of a target RNA via RNA interference, wherein each strand of said RNA molecule is about 21 to about 23 nucleotides in length; one strand of the RNA molecule comprises nucleotide sequence having sufficient complementarity to the target RNA for the RNA molecule to direct cleavage of the target RNA via RNA interference; and wherein at least one strand of the RNA molecule comprises one or more chemically modified nucleotides described herein, such as deoxynucleotides, 2′-O-methyl nucleotides, 2′-deoxy-2′-fluoro nucloetides, 2′-O-methoxyethyl nucleotides etc.

[0068] In one embodiment, the invention features a medicament comprising a siNA molecule of the invention.

[0069] In one embodiment, the invention features an active ingredient comprising a siNA molecule of the invention.

[0070] In one embodiment, the invention features the use of a double-stranded short interfering nucleic acid (siNA) molecule to down-regulate expression of a target gene, wherein the siNA molecule comprises one or more chemical modifications and each strand of the double-stranded siNA is about 21 nucleotides long.

[0071] In one embodiment, the invention features the use of a double-stranded short interfering nucleic acid (siNA) molecule to down-regulate expression of a target gene, wherein the siNA molecule comprises one or more chemical modifications and each strand of the double-stranded siNA is about 18 to about 28 or more (e.g., 17, 18, 19, 20, 21, 22, 23, 24, 25, 26, 27, 28 or more) nucleotides long.

[0072] The invention features a double-stranded short interfering nucleic acid (siNA) molecule that inhibits expression of a gene, wherein one of the strands of the double-stranded siNA molecule is an antisense strand which comprises nucleotide sequence that is complementary to nucleotide sequence of a RNA encoded by the gene or a portion thereof, the other strand is a sense strand which comprises nucleotide sequence that is complementary to a nucleotide sequence of the antisense strand and wherein a majority of the pyrimidine nucleotides present in the double-stranded siNA molecule comprises a sugar modification.

[0073] In one embodiment, the nucleotide sequence of the antisense strand of a siNA molecule of the invention is complementary to the nucleotide sequence of a RNA which encodes a protein or a portion thereof. In one embodiment, each strand of the siNA molecule comprises about 19 to about 29 (e.g., about 18, 19, 20, 21, 22, 23, 24, 25, 26, 27, 28, 29 or 30) nucleotides, and each strand comprises at least about 19 nucleotides that are complementary to the nucleotides of the other strand.

[0074] In one embodiment, a siNA molecule of the invention is assembled from two oligonucleotide fragments, wherein one fragment comprises the nucleotide sequence of the antisense strand of the siNA molecule and a second fragment comprises nucleotide sequence of the sense region of the siNA molecule. In another embodiment, the sense strand is connected to the antisense strand via a linker molecule, such as a polynucleotide linker or a non nucleotide linker.

[0075] In one embodiment, of a siNA molecule of the invention, the pyrimidine nucleotides present in the sense strand are 2′-deoxy-2′-fluoro pyrimidine nucleotides and the purine nucleotides present in the sense region are 2′-deoxy purine nucleotides. In another embodiment, the pyrimidine nucleotides present in the sense strand are 2′-deoxy-2′-fluoro pyrimidine nucleotides and the purine nucleotides present in the sense region are 2′-O-methyl purine nucleotides: In one embodiment, the sense strand comprises a 3′-end and a 5′-end, wherein a terminal cap moiety (e.g., an inverted deoxy abasic moiety) is present at the 5′-end, the 3′-end, or both of the 5′ and 3′ ends of the sense strand. In one embodiment, the antisense strand comprises one or more 2′-deoxy-2′-fluoro pyrimidine nucleotides and one or more 2′-O-methyl purine nucleotides. In one embodiment, the pyrimidine nucleotides present in the antisense strand are 2′-deoxy-2′-fluoro pyrimidine nucleotides and any purine nucleotides present in the antisense strand are 2′-O-methyl purine nucleotides. In one embodiment, the antisense strand comprises a phosphorothioate intemucleotide linkage at the 3′ end of the antisense strand. In another embodiment, the antisense strand comprises a glyceryl modification at the 3′ end. In another embodiment, the 5′-end of the antisense strand optionall_{y} includes a phosphate group.

[0076] In one embodiment, the invention features a double-stranded short interfering nucleic acid (siNA) molecule that down-regulates expression of a gene, wherein one of the strands of the double-stranded siNA molecule is an antisense strand which comprises nucleotide sequence that is complementary to nucleotide sequence of RNA encoded by a gene or a portion thereof, the other strand is a sense strand which comprises nucleotide sequence that is complementary to a nucleotide sequence of the antisense strand and wherein a majority of the pyrimidine nucleotides present in the double-stranded siNA molecule comprises a sugar modification, and wherein the nucleotide sequence of the antisense strand is complementary to a nucleotide sequence of the 5′-untranslated region or a portion thereof of the RNA. In another embodiment, the nucleotide sequence of the antisense strand is complementary to a nucleotide sequence of the RNA or a portion thereof.

[0077] In one embodiment, the invention features a double-stranded short interfering nucleic acid (siNA) molecule that inhibits expression of a gene, wherein one of the strands of the double-stranded siNA molecule is an antisense strand which comprises nucleotide sequence that is complementary to nucleotide sequence of a RNA or a portion thereof, the other strand is a sense strand which comprises nucleotide sequence that is complementary to a nucleotide sequence of the antisense strand and wherein a majority of the pyrimidine nucleotides present in the double-stranded siNA molecule comprises a sugar modification, and wherein each of the two strands of the siNA molecule comprises 21 nucleotides. In one embodiment, about 19 nucleotides of each strand of the siNA molecule are base-paired to the complementary nucleotides of the other strand of the siNA molecule and at least two 3′ terminal nucleotides of each strand of the siNA molecule are not base-paired to the nucleotides of the other strand of the siNA molecule. In one embodiment, each of the two 3′ terminal nucleotides of each fragment of the siNA molecule are 2′-deoxy-pyrimidines, such as 2′-deoxy-thymidine. In another embodiment, each strand of the siNA molecule is base-paired to the complementary nucleotides of the other strand of the siNA molecule. In one embodiment, about 19 nucleotides of the antisense strand are base-paired to the nucleotide sequence of the RNA or a portion thereof. In another embodiment, 21 nucleotides of the antisense strand are base-paired to the nucleotide sequence of the RNA or a portion thereof.

[0078] In one embodiment, the invention features a composition comprising a siNA molecule of the invention and a pharmaceutically acceptable carrier or diluent.

[0079] In one embodiment, the invention features a method of increasing the stability of a siNA molecule against cleavage by ribonucleases comprising introducing at least one modified nucleotide into the siNA molecule, wherein the modified nucleotide is a 2′-deoxy-2′-fluoro nucleotide. In another embodiment, all pyrimidine nucleotides present in the siNA are 2′-deoxy-2′-fluoro pyrimidine nucleotides. In another embodiment, the modified nucleotides in the siNA include at least one 2′-deoxy-2′-fluoro cytidine or 2′-deoxy-2′-fluoro uridine nucleotide. In another embodiment, the modified nucleotides in the siNA include at least one 2′-fluoro cytidine and at least one 2′-deoxy-2′-fluoro uridine nucleotides. In another embodiment, all uridine nucleotides present in the siNA are 2′-deoxy-2′-fluoro uridine nucleotides. In another embodiment, all cytidine nucleotides present in the siNA are 2′-deoxy-2′-fluoro cytidine nucleotides. In another embodiment, all adenosine nucleotides present in the siNA are 2′-deoxy-2′-fluoro adenosine nucleotides. In another embodiment, all guanosine nucleotides present in the siNA are 2′-deoxy-2′-fluoro guanosine nucleotides. The siNA can further comprise at least one modified intemucleotidic linkage, such as phosphorothioate linkage. In another embodiment, the 2′-deoxy-2′-fluoronucleotides are present at specifically selected locations in the siNA that are sensitive to cleavage by ribonucleases, such as locations having pyrimidine nucleotides.

[0080] In one embodiment, the invention features the use of a double-stranded short interfering nucleic acid (siNA) molecule that inhibits expression of a gene, wherein one of the strands of the double-stranded siNA molecule is an antisense strand which comprises nucleotide sequence that is complementary to nucleotide sequence of a RNA or a portion thereof, the other strand is a sense strand which comprises nucleotide sequence that is complementary to a nucleotide sequence of the antisense strand and wherein a majority of the pyrimidine nucleotides present in the double-stranded siNA molecule comprises a sugar modification.

[0081] In one embodiment, the invention features a short interfering nucleic acid (siNA) molecule comprising a double-stranded structure that down-regulates expression of a target nucleic acid, wherein the siNA molecule does not require a 2′-hydroxyl group containing ribonucleotide, each strand of the double-stranded structure of the siNA molecule comprises about 21 nucleotides and the siNA molecule comprises nucleotide sequence having complementarity to nucleotide sequence of the target nucleic acid or a portion thereof. The target nucleic acid can be an endogenous gene, an exogenous gene, a viral nucleic acid, or a RNA, such as a mammalian gene, plant gene, viral gene, fungal gene, bacterial gene, plant viral gene, or mammalian viral gene. Examples of mammalian viral gene include hepatitis C virus, human immunodeficiency virus, hepatitis B virus, herpes simplex virus, cytomegalovirus, human papilloma virus, respiratory syncytial virus, influenza virus, and severe acute respiratory syndrome virus (SARS).

[0082] In one embodiment, a siNA molecule of the invention comprises a sense region and an antisense region wherein the antisense region comprises the nucleotide sequence that is complementary to a nucleotide sequence or a portion thereof of the target nucleic acid and the sense region comprises a nucleotide sequence that is complementary to nucleotide sequence of the antisense region or a portion thereof.

[0083] In one embodiment, a siNA molecule of the invention is assembled from two separate oligonucleotide fragments wherein one fragment comprises the sense region and the second fragment comprises the antisense region of the siNA molecule. The sense region can be connected to the antisense region via a linker molecule, such as a polynucleotide linker or non-nucleotide linker. In another embodiment, each sense region and antisense region comprise about 21 nucleotides in length. In another embodiment, about 19 nucleotides of each fragment of the siNA molecule are base-paired to the complementary nucleotides of the other fragment of the siNA molecule and at least two 3′ terminal nucleotides of each fragment of the siNA molecule are not base-paired to the nucleotides of the other fragment of the siNA molecule. In another embodiment, each of the two 3′ terminal nucleotides of each fragment of the siNA molecule. are 2′-deoxy-pyrimidines, such as the thymidine. In another embodiment, all 21 nucleotides of each fragment of the siNA molecule are base-paired to the complementary nucleotides of the other fragment of the siNA molecule. In another embodiment, about 19 nucleotides of the antisense region of the siNA molecule are base-paired to the nucleotide sequence or a portion thereof of the the target nucleic acid. In another embodiment, 21 nucleotides of the antisense region of the siNA molecule are base-paired to the nucleotide sequence or a portion thereof of the target nucleic acid. In another embodiment, the 5′-end of the fragment comprising the antisense region optionally includes a phosphate group.

[0084] In one embodiment, a siNA molecule of the invention comprises nucleotide sequence having complementarity to nucleotide sequence of RNA or a portion thereof encoded by the target nucleic acid or a portion thereof.

[0085] In one embodiment, a siNA molecule of the invention comprises a sense region and an antisense region, wherein the pyrimidine nucleotides when present in the sense region are 2′-O-methyl pyrimidine nucleotides and wherein the purine nucleotides when present in the sense region are 2′-deoxy purine nucleotides.

[0086] In one embodiment, a siNA molecule of the invention comprises a sense region and an antisense region, wherein the pyrimidine nucleotides when present in the sense region are 2′-deoxy-2′-fluoro pyrimidine nucleotides and wherein the purine nucleotides when present in the sense region are 2′-deoxy purine nucleotides.

[0087] In one embodiment, a siNA molecule of the invention comprises a sense region and an antisense region, wherein the sense region includes a terminal cap moiety at the 5′-end, the 3′-end, or both of the 5′ and 3′ ends. The cap moiety can be an inverted deoxy abasic moiety, an inverted deoxy thymidine moiety, or a thymidine moiety.

[0088] In one embodiment, a siNA molecule of the invention comprises a sense region and an antisense region, wherein the pyrimidine nucleotides when present in the antisense region are 2′-deoxy-2′-fluoro pyrimidine nucleotides and the purine nucleotides when present in the antisense region are 2′-O-methyl purine nucleotides.

[0089] In one embodiment, a siNA molecule of the invention comprises a sense region and an antisense region, wherein the pyrimidine nucleotides when present in the antisense region are 2′-deoxy-2′-fluoro pyrimidine nucleotides and wherein the purine nucleotides when present in the antisense region comprise 2′-deoxy- purine nucleotides.

[0090] In one embodiment, a siNA molecule of the invention comprises a sense region and an antisense region, wherein the antisense region comprises a phosphate backbone modification at the 3′ end of the antisense region. The phosphate backbone modification can be a phosphorothioate.

[0091] In one embodiment, a siNA molecule of the invention comprises a sense region and an antisense region, wherein the antisense region comprises a glyceryl modification at the 3′ end of the antisense region.

[0092] In one embodiment, a siNA molecule of the invention comprises a sense region and an antisense region, wherein each of sense and the antisense regions of the siNA molecule comprise about 21 nucleotides.

[0093] In a non-limiting example, the introduction of chemically-modified nucleotides into nucleic acid molecules provides a powerful tool in overcoming potential limitations of in vivo stability and bioavailability inherent to native RNA molecules that are delivered exogenously. For example, the use of chemically-modified nucleic acid molecules can enable a lower dose of a particular nucleic acid molecule for a given therapeutic effect since chemically-modified nucleic acid molecules tend to have a longer half-life in serum. Furthermore, certain chemical modifications can improve the bioavailability of nucleic acid molecules by targeting particular cells or tissues and/or improving cellular uptake of the nucleic acid molecule. Therefore, even if the activity of a chemically-modified nucleic acid molecule is reduced as compared to a native nucleic acid molecule, for example, when compared to an all-RNA nucleic acid molecule, the overall activity of the modified nucleic acid molecule can be greater than that of the native molecule due to improved stability and/or delivery of the molecule. Unlike native unmodified siNA, chemically-modified siNA can also minimize the possibility of activating interferon activity in humans.

[0094] In any of the embodiments of siNA molecules described herein, the antisense region of a siNA molecule of the invention can comprise a phosphorothioate internucleotide linkage at the 3′-end of said antisense region. In any of the embodiments of siNA molecules described herein, the antisense region can comprise about one to about five phosphorothioate intemucleotide linkages at the 5′-end of said antisense region. In any of the embodiments of siNA molecules described herein, the 3′-terminal nucleotide overhangs of a siNA molecule of the invention can comprise ribonucleotides or deoxyribonucleotides that are chemically-modified at a nucleic acid sugar, base, or backbone. In any of the embodiments of siNA molecules described herein, the 3′-terminal nucleotide overhangs can comprise one or more universal base ribonucleotides. In any of the embodiments of siNA molecules described herein, the 3′-terminal nucleotide overhangs can comprise one or more acyclic nucleotides.

[0095] One embodiment of the invention provides an expression vector comprising a nucleic acid sequence encoding at least one siNA molecule of the invention in a manner that allows expression of the nucleic acid molecule. Another embodiment of the invention provides a mammalian cell comprising such an expression vector. The mammalian cell can be a human cell. The siNA molecule of the expression vector can comprise a sense region and an antisense region. The antisense region can comprise sequence complementary to an RNA or DNA sequence encoding a protein or polypeptide and the sense region can comprise sequence complementary to the antisense region. The siNA molecule can comprise two distinct strands having complementary sense and antisense regions. The siNA molecule can comprise a single strand having complementary sense and antisense regions.

[0096] In one embodiment, the invention features a chemically-modified short interfering nucleic acid (siNA) molecule capable of mediating RNA interference (RNAi) inside a cell or reconstituted in vitro system, wherein the chemical modification comprises one or more (e.g., about 1, 2, 3, 4, 5, 6, 7, 8, 9, 10, or more) nucleotides comprising a backbone modified internucleotide linkage having Formula I:

[chemical structure]

wherein each R₁ and R₂ is independently any nucleotide, non-nucleotide, or polynucleotide which can be naturally-occurring or chemically-modified, each X and Y is independently O, S, N, alkyl, or substituted alkyl, each Z and W is independently O, S, N, alkyl, substituted alkyl, O-alkyl, S-alkyl, alkaryl, or aralkyl, and wherein W, X, Y, and Z are optionally not all O. In another embodiment, a backbone modification of the invention comprises a phosphonoacetate and/or thiophosphonoacetate internucleotide linkage (see for example Sheehan et al., 2003, Nucleic Acids Research, 31, 4109-4118).

[0097] The chemically-modified internucleotide linkages having Formula I, for example, wherein any Z, W, X, and/or Y independently comprises a sulphur atom, can be present in one or both oligonucleotide strands of the siNA duplex, for example, in the sense strand, the antisense strand, or both strands. The siNA molecules of the invention can comprise one or more (e.g., about 1, 2, 3, 4, 5, 6, 7, 8, 9, 10, or more) chemically-modified intemucleotide linkages having Formula I at the 3′-end, the 5′-end, or both of the 3′ and 5′-ends of the sense strand, the antisense strand, or both strands. For example, an exemplary siNA molecule of the invention can comprise about 1 to about 5 or more (e.g., about 1, 2, 3, 4, 5, or more) chemically-modified intemucleotide linkages having Formula I at the 5′-end of the sense strand, the antisense strand, or both strands. In another non-limiting example, an exemplary siNA molecule of the invention can comprise one or more (e.g., about 1, 2, 3, 4, 5, 6, 7, 8, 9, 10, or more) pyrimidine nucleotides with chemically-modified intemucleotide linkages having Formula I in the sense strand, the antisense strand, or both strands. In yet another non-limiting example, an exemplary siNA molecule of the invention can comprise one or more (e.g., about 1, 2, 3, 4, 5, 6, 7, 8, 9, 10, or more) purine nucleotides with chemically-modified intemucleotide linkages having Formula I in the sense strand, the antisense strand, or both strands. In another embodiment, a siNA molecule of the invention having intemucleotide linkage(s) of Formula I also comprises a chemically-modified nucleotide or non-nucleotide having any of Formulae

[0098] In one embodiment, the invention features a chemically-modified short interfering nucleic acid (siNA) molecule capable of mediating RNA interference (RNAi) inside a cell or reconstituted in vitro system, wherein the chemical modification comprises one or more (e.g., about 1, 2, 3, 4, 5, 6, 7, 8, 9, 10, or more) nucleotides or non-nucleotides having Formula II:

[chemical structure]

wherein each R₃, R₄, R₅, R₆, R₇, R₈, R₁₀, R₁₁ and R₁₂ is independently H, OH, alkyl, substituted alkyl, alkaryl or aralkyl, F, Cl, Br, CN, CF₃, OCF₃, OCN, O-alkyl, S-alkyl, N-alkyl, O-alkenyl, S-alkenyl, N-alkenyl, SO-alkyl, alkyl-OSH, alkyl-OH, O-alkyl-OH, O-alkyl-SH, S-alkyl-OH, S-alkyl-SH, alkyl-S-alkyl, alkyl-O-alkyl, ONO₂, NO₂, N₃, NH₂, aminoalkyl, aminoacid, aminoacyl, ONH₂, O-aminoacid, O-aminoacyl, heterocycloallcyl, heterocycloalkaryl, aminoalkylamino, polyalldylamino, substituted silyl, or group having Formula I or II; R₉ is O, S, CH₂, S═O, CHF, or CF₂, and B is a nucleosidic base such as adenine, guanine, uracil, cytosine, thymine, 2-aminoadenosine, 5-methylcytosine, 2,6-diaminopurine, or any other non-naturally occurring base that can be complementary or non-complementary to target RNA or a non-nucleosidic base such as phenyl, naphthyl, 3-nitropyrrole, 5-nitroindole, nebularine, pyridone, pyridinone, or any other non-naturally occurring universal base that can be complementary or non-complementary to target RNA.

[0099] The chemically-modified nucleotide or non-nucleotide of Formula II can be present in one or both oligonucleotide strands of the siNA duplex, for example in the sense strand, the antisense strand, or both strands. The siNA molecules of the invention can comprise one or more chemically-modified nucleotide or non-nucleotide of Formula II at the 3′-end, the 5′-end, or both of the 3′ and 5′-ends of the sense strand, the antisense strand, or both strands. For example, an exemplary siNA molecule of the invention can comprise about 1 to about 5 or more (e.g., about 1, 2, 3, 4, 5, or more) chemically-modified nucleotides or non-nucleotides of Formula II at the 5′-end of the sense strand, the antisense strand, or both strands. In anther non-limiting example, an exemplary siNA molecule of the invention can comprise about 1 to about 5 or more (e.g., about 1, 2, 3, 4, 5, or more) chemically-modified nucleotides or non-nucleotides of Formula II at the 3′-end of the sense strand, the antisense strand, or both strands.

[0100] In one embodiment, the invention features a chemically-modified short interfering nucleic acid (siNA) molecule capable of mediating RNA interference (RNAi) inside a cell or reconstituted in vitro system, wherein the chemical modification comprises one or more (e.g., about 1, 2, 3, 4, 5, 6, 7, 8, 9, 10, or more) nucleotides or non-nucleotides having Formula III:

[chemical structure]

wherein each R₃, R₄, R₅, R₆, R₇, R₈, R₁₀, R₁₁ and R₁₂ is independently H, OH, alkyl, substituted alkyl, alkaryl or aralkyl, F, Cl, Br, CN, CF₃, OCF₃, OCN, O-alkyl, S-alkyl, N-alkyl, O-alkenyl, S-alkenyl, N-alkenyl, SO-alkyl, alkyl-OSH, alkyl-OH, O-alkyl-OH, O-alkyl-SH, S-alkyl-OH, S-allcyl-SH, alkyl-S-alkyl, alkyl-O-alkyl, ONO₂, NO₂, N₃, NH₂, aminoalkyl, aminoacid, aminoacyl, ONH₂, O-aminoalkyl, O-aminoacid, O-aminoacyl, heterocycloalkyl, heterocycloalkaryl, aminoalkylamino, polyalklylamino, substituted silyl, or group having Formula I or II; R₉ is O, S, CH₂, S═O, CHF, or CF₂, and B is a nucleosidic base such as adenine, guanine, uracil, cytosine, thymine, 2-aminoadenosine, 5-methylcytosine, 2,6-diaminopurine, or any other non-naturally occurring base that can be employed to be complementary or non-complementary to target RNA or a non-nucleosidic base such as phenyl, naphthyl, 3-nitropyrrole, 5-nitroindole, nebularine, pyridone, pyridinone, or any other non-naturally occurring universal base that can be complementary or non-complementary to target RNA.

[0101] The chemically-modified nucleotide or non-nucleotide of Formula III can be present in one or both oligonucleotide strands of the siNA duplex, for example, in the sense strand, the antisense strand, or both strands. The siNA molecules of the invention can comprise one or more chemically-modified nucleotide or non-nucleotide of Formula III at the 3′-end, the 5′-end, or both of the 3′ and 5′-ends of the sense strand, the antisense strand, or both strands. For example, an exemplary siNA molecule of the invention can comprise about 1 to about 5 or more (e.g., about 1, 2, 3, 4, 5, or more) chemically-modified nucleotide(s) or non-nucleotide(s) of Formula III at the 5′-end of the sense strand, the antisense strand, or both strands. In anther non-limiting example, an exemplary siNA molecule of the invention can comprise about 1 to about 5 or more (e.g., about 1, 2, 3, 4, 5, or more) chemically-modified nucleotide or non-nucleotide of Formula III at the 3′-end of the sense strand, the antisense strand, or both strands.

[0102] In another embodiment, a siNA molecule of the invention comprises a nucleotide having Formula II or III, wherein the nucleotide having Formula II or III is in an inverted configuration. For example, the nucleotide having Formula II or III is connected to the siNA construct in a 3′-3′, 3′-2′, 2′-3′, or 5′-5′ configuration, such as at the 3′-end, the 5′-end, or both of the 3′ and 5′-ends of one or both siNA strands.

[0103] In one embodiment,. the invention features. .a chemically-modified short interfering nucleic acid (siNA) molecule capable of mediating RNA interference (RNAi) inside a cell or reconstituted in vitro system, wherein the chemical modification comprises a 5′-terminal phosphate group having Formula IV:

[chemical structure]

wherein each X and y is independently O, S, N, alkyl, substituted alkyl, or alkylhalo; wherein each Z and W is independently O, S, N, alkyl, substituted alkyl, O-alkyl, S-alkyl, alkaryl, aralkyl, or alkylhalo or acetyl; and/or wherein W, X, Y and Z are not all O.

[0104] In one embodiment, the invention features a siNA molecule having a 5′-terminal phosphate group having Formula IV on the target-complementary strand, for example, a strand complementary to a target RNA, wherein the siNA molecule comprises an all RNA siNA molecule. In another embodiment, the invention features a siNA molecule having a 5′-terminal phosphate group having Formula IV on the target-complementary strand wherein the siNA molecule also comprises about 1 to about 3 (e.g., about 1, 2, or 3) nucleotide 3′-terminal nucleotide overhangs having about 1 to about 4 (e.g., about 1, 2, 3, or 4) deoxyribonucleotides on the 3′-end of one or both strands. In another embodiment, a 5′-terminal phosphate group having Formula N is present on the target-complementary strand of a siNA molecule of the invention, for example a siNA molecule having chemical modifications having any of Formulae

[0105] In one embodiment, the invention features a chemically-modified short interfering nucleic acid (siNA) molecule capable of mediating RNA interference (RNAi) inside a cell or reconstituted in vitro system, wherein the chemical modification comprises one or more phosphorothioate, phosphonoacetate, and/or thiophosphonoacetate internucleotide linkages. For example, in a non-limiting example, the invention features a chemically-modified short interfering nucleic acid (siNA) having about 1, 2, 3, 4, 5, 6, 7, 8 or more phosphorothioate intemucleotide linkages in one siNA strand. In yet another embodiment, the invention features a chemically-modified short interfering nucleic acid (siNA) individually having about 1, 2, 3, 4, 5, 6, 7, 8 or more phosphorothioate internucleotide linkages in both siNA strands. The phosphorothioate internucleotide linkages can be present in one or both oligonucleotide strands of the siNA duplex, for example in the sense strand, the antisense strand, or both strands. The siNA molecules of the invention can comprise one or more phosphorothioate, phosphonoacetate, and/or thiophosphonoacetate intemucleotide linkages at the 3′-end, the 5′-end, or both of the 3′- and 5′-ends of the sense strand, the antisense strand, or both strands. For example, an exemplary siNA molecule of the invention can comprise about 1 to about 5 or more (e.g., about 1, 2, 3, 4, 5, or more) consecutive phosphorothioate internucleotide linkages at the 5′-end of the sense strand, the antisense strand, or both strands. In another non-limiting example, an exemplary siNA molecule of the invention can comprise one or more (e.g., about 1, 2, 3, 4, 5, 6, 7, 8, 9, 10, or more) pyrimidine phosphorothioate intemucleotide linkages in the sense strand, the antisense strand, or both strands. In yet another non-limiting example, an exemplary siNA molecule of the invention can comprise one or more (e.g., about 1, 2, 3, 4, 5, 6, 7, 8, 9, 10, or more) purine phosphorothioate intemucleotide linkages in the sense strand, the antisense strand, or both strands.

[0106] In one embodiment, the invention features a siNA molecule, wherein the sense strand comprises one or more, for example, about 1, 2, 3, 4, 5, 6, 7, 8, 9, 10, or more phosphorothioate intemucleotide linkages, and/or one or more (e.g., about 1, 2, 3, 4, 5, 6, 7, 8, 9, 10 or more) 2′-deoxy, 2′-O-methyl, 2′-deoxy-2′-fluoro, and/or about one or more (e.g., about 1, 2, 3, 4, 5, 6, 7, 8, 9, 10 or more) universal base modified nucleotides, and optionally a terminal cap molecule at the 3′-end, the 5′-end, or both of the 3′- and 5′-ends of the sense strand; and wherein the antisense strand comprises about 1 to about 10 or more, specifically about 1, 2, 3, 4, 5, 6, 7, 8, 9, 10, or more phosphorothioate intemucleotide linkages, and/or one or more (e.g., about 1, 2, 3, 4, 5, 6, 7, 8, 9, 10 or more) 2′-deoxy, 2′-O-methyl, 2′-deoxy-2′-fluoro, and/or one or more (e.g., about 1, 2, 3, 4, 5, 6, 7, 8, 9, 10 or more) universal base modified nucleotides, and optionally a terminal cap molecule at the 3′-end, the 5′-end, or both of the 3′- and 5′-ends of the antisense strand. In another embodiment, one or more, for example about 1, 2, 3, 4, 5, 6, 7, 8, 9, 10, or more, pyrimidine nucleotides of the sense and/or antisense siNA strand are chemically-modified with 2′-deoxy, 2′-O-methyl and/or 2′-deoxy-2′-fluoro nucleotides, with or without one or more, for example about 1, 2, 3, 4, 5, 6, 7, 8, 9, 10, or more, phosphorothioate intemucleotide linkages and/or a terminal cap molecule at the 3′-end, the 5′-end, or both of the 3′- and 5′-ends, being present in the same or different strand.

[0107] In another embodiment, the invention features a siNA molecule, wherein the sense strand comprises about 1 to about 5, specifically about 1, 2, 3, 4, or 5 phosphorothioate intemucleotide linkages, and/or one or more (e.g., about 1, 2, 3, 4, 5, or more) 2′-deoxy, 2′-O-methyl, 2′-deoxy-2′-fluoro, and/or one or more (e.g., about 1, 2, 3, 4, 5, or more) universal base modified nucleotides, and optionally a terminal cap molecule at the 3-end, the 5′-end, or both of the 3′- and 5′-ends of the sense strand; and wherein the antisense strand comprises about 1 to about 5 or more, specifically about 1, 2, 3, 4, 5, or more phosphorothioate intemucleotide linkages, and/or one or more (e.g., about 1, 2, 3, 4, 5, 6, 7, 8, 9, 10 or more) 2′-deoxy, 2′-O-methyl, 2′-deoxy-2′-fluoro, and/or one or more (e.g., about 1, 2, 3, 4, 5, 6, 7, 8, 9, 10 or more) universal base modified nucleotides, and optionally a terminal cap molecule at the 3′-end, the 5′-end, or both of the 3′- and 5′-ends of the antisense strand. In another embodiment, one or more, for example about 1, 2, 3, 4, 5, 6, 7, 8, 9, 10, or more, pyrimidine nucleotides of the sense and/or antisense siNA strand are chemically-modified with 2′-deoxy, 2′-O-methyl and/or 2′-deoxy-2′-fluoro nucleotides, with or without about 1 to about 5 or more, for example about 1, 2, 3, 4, 5, or more phosphorothioate intemucleotide linkages and/or a terminal cap molecule at the 3′-end, the 5′-end, or both of the 3′- and 5′-ends, being present in the same or different strand.

[0108] In one embodiment, the invention features a siNA molecule, wherein the antisense strand comprises one or more, for example, about 1, 2, 3, 4, 5, 6, 7, 8, 9, 10, or more phosphorothioate intemucleotide linkages, and/or about one or more (e.g., about 1, 2, 3, 4, 5, 6, 7, 8, 9, 10 or more) 2′-deoxy, 2′-deoxy-2′-fluoro, and/or one or more (e.g., about 1, 2, 3, 4, 5, 6, 7, 8, 9, 10 or more) universal base modified nucleotides, and optionally a terminal cap molecule at the 3′-end, the 5′-end, or both of the 3′- and 5′-ends of the sense strand; and wherein the antisense strand comprises about 1 to about 10 or more, specifically about 1, 2, 3, 4, 5, 6, 7, 8, 9, 10 or more phosphorothioate internucleotide linkages, and/or one or more (e.g., about 1, 2, 3, 4, 5, 6, 7, 8, 9, 10 or more) 2′-deoxy, 2′-O-methyl, 2′-deoxy-2′-fluoro, and/or one or more (e.g., about 1, 2, 3, 4, 5, 6, 7, 8, 9, 10 or more) universal base modified nucleotides, and optionally a terminal cap molecule at the 3′-end, the 5′-end, or both of the 3′- and 5′-ends of the antisense strand. In another embodiment, one or more, for example about 1, 2, 3, 4, 5, 6, 7, 8, 9, 10 or more pyrimidine nucleotides of the sense and/or antisense siNA strand are chemically-modified with 2′-deoxy, 2′-O-methyl and/or 2′-deoxy-2′-fluoro nucleotides, with or without one or more, for example, about 1, 2, 3, 4, 5, 6, 7, 8, 9, 10 or more phosphorothioate intemucleotide linkages and/or a terminal cap molecule at the 3′-end, the 5′-end, or both of the 3′ and 5′-ends, being present in the same or different strand.

[0109] In another embodiment, the invention features a siNA molecule, wherein the antisense strand comprises about 1 to about 5 or more, specifically about 1, 2, 3, 4, 5 or more phosphorothioate internucleotide linkages, and/or one or more (e.g., about 1, 2, 3, 4, 5, 6, 7, 8, 9, 10 or more) 2′-deoxy, 2′-deoxy-2′-fluoro, and/or one or more (e.g., about 1, 2, 3, 4, 5, 6, 7, 8, 9, 10 or more) universal base modified nucleotides, and optionally a terminal cap molecule at the 3′-end, the 5′-end, or both of the 3′- and 5′-ends of the sense strand; and wherein the antisense strand comprises about 1 to about 5 or more, specifically about 1, 2, 3, 4, 5 or more phosphorothioate internucleotide linkages, and/or one or more (e.g., about 1, 2, 3, 4, 5, 6, 7, 8, 9, 10 or more) 2′-deoxy, 2′-O-methyl, 2′-deoxy-2′-fluoro, and/or one or more (e.g., about 1, 2, 3, 4, 5, 6, 7, 8, 9, 10 or more) universal base modified nucleotides, and optionally a terminal cap molecule at the 3′-end, the 5′-end, or both of the 3′- and 5′-ends of the antisense strand. In another embodiment, one or more, for example about 1, 2, 3, 4, 5, 6, 7, 8, 9, 10 or more pyrimidine nucleotides of the sense and/or antisense siNA strand are chemically-modified with 2′-deoxy, 2′-O-methyl and/or 2′-deoxy-2′-fluoro nucleotides, with or without about 1 to about 5, for example about 1, 2, 3, 4, 5 or more phosphorothioate internucleotide linkages and/or a terminal cap molecule at the 3′-end, the 5′-end, or both of the 3′- and 5′-ends, being present in the same or different strand.

[0110] In one embodiment, the invention features a chemically-modified short interfering nucleic acid (siNA) molecule having about 1 to about 5, specifically about 1, 2, 3, 4, 5 or more phosphorothioate internucleotide linkages in each strand of the siNA molecule.

[0111] In another embodiment, the invention features a siNA molecule comprising 2′-5′ internucleotide linkages. The 2′-5′ internucleotide linkage(s) can be at the 3′-end, the 5′-end, or both of the 3′- and 5′-ends of one or both siNA sequence' strands. In addition, the 2′-5′ internucleotide linkage(s) can be present at various other positions within one or both siNA sequence strands, for example, about 1, 2, 3, 4, 5, 6, 7, 8, 9, 10, or more including every internucleotide linkage of a pyrimidine nucleotide in one or both strands of the siNA molecule can comprise a 2′-5′ internucleotide linkage, or about 1, 2, 3, 4, 5, 6, 7, 8, 9, 10, or More including every internucleotide linkage of a purine nucleotide in one or both strands of the siNA molecule can comprise a 2′-5′ internucleotide linkage.

[0112] In another embodiment, a chemically-modified siNA molecule of the invention comprises a duplex having two strands, one or both of which can be chemically-modified, wherein each strand is about 18 to about 27 (e.g., about 18, 19, 20, 21, 22, 23, 24, 25, 26, or 27) nucleotides in length, wherein the duplex has about 18 to about 23 (e.g., about 18, 19, 20, 21, 22, or 23) base pairs, and wherein the chemical modification comprises a structure having any of Formulae I-VII. For example, an exemplary chemically-modified siNA molecule of the invention comprises a duplex having two strands, one or both of which can be chemically-modified with a chemical modification having any of Formulae I-VII or any combination thereof, wherein each strand consists of about 21 nucleotides, each having a 2-nucleotide 3′-terminal nucleotide overhang, and wherein the duplex has about 19 base pairs. In another embodiment, a siNA molecule of the invention comprises a single stranded hairpin structure, wherein the siNA is about 36 to about 70 (e.g., about 36, 40, 45, 50, 55, 60, 65, or 70) nucleotides in length having about 18 to about 23 (e.g., about 18, 19, 20, 21, 22, or 23) base pairs, and wherein the siNA can include a chemical modification comprising a structure having any of Formulae I-VII or any combination thereof. For example, an exemplary chemically-modified siNA molecule of the invention comprises a linear oligonucleotide having about 42 to about 50 (e.g., about 42, 43, 44, 45, 46, 47, 48, 49, or 50) nucleotides that is chemically-modified with a chemical modification having any of Formulae I-VII or any combination thereof, wherein the linear oligonucleotide forms a hairpin structure having about 19 base pairs and a 2-nucleotide 3′-terminal nucleotide overhang. In another embodiment, a linear hairpin siNA molecule of the invention contains a stem loop motif, wherein the loop portion of the siNA molecule is biodegradable. For example, a linear hairpin siNA molecule of the invention is designed such that degradation of the loop portion of the siNA molecule in vivo can generate a double-stranded siNA molecule with 3′-terminal overhangs, such as 3′-terminal nucleotide overhangs comprising about 2 nucleotides.

[0113] In another embodiment, a siNA molecule of the invention comprises a hairpin structure, wherein the siNA is about 25 to about 50 (e.g., about 25, 26, 27, 28, 29, 30, 31, 32, 33, 34, 35, 36, 37, 38, 39, 40, 41, 42, 43, 44, 45, 46, 47, 48, 49, or 50) nucleotides in length having about 3 to about 25 (e.g., about 3, 4, 5, 6, 7,8,9, 10, 11, 12, 13, 14, 15, 16, 17, 18, 19, 20, 21, 22, 23, 24, or 25) base pairs, and wherein the siNA can include one or more chemical modifications comprising a structure having any of Formulae or any combination thereof. For example, an exemplary chemically-modified siNA molecule of the invention comprises a linear oligonucleotide having about 25 to about 35 (e.g., about 25, 26, 27, 28, 29, 30, 31, 32, 33, 34, or 35) nucleotides that is chemically-modified with one or more chemical modifications having any of Formulae I-VII or any combination thereof, wherein the linear oligonucleotide forms a hairpin structure having about 3 to about 23 (e.g., about 3, 4, 5, 6, 7, 8, 9, 10, 11, 12, 13, 14, 15, 16, 17, 18, 19, 20, 21, 22, or 23) base pairs and a 5′-terminal phosphate group that can be chemically modified as described herein (for example a 5′-terminal phosphate group having Formula IV). In another embodiment, a linear hairpin siNA molecule of the invention contains a stem loop motif, wherein the loop portion of the siNA molecule is biodegradable. In another embodiment, a linear hairpin siNA molecule of the invention comprises a loop portion comprising a non-nucleotide linker.

[0114] In another embodiment, a siNA molecule of the invention comprises an asymmetric hairpin structure, wherein the siNA is about 25 to about 50 (e.g., about 25, 26, 27, 28, 29, 30, 31, 32, 33, 34, 35, 36, 37, 38, 39, 40, 41, 42, 43, 44, 45, 46, 47, 48, 49, or 50) nucleotides in length having about 3 to about 20 (e.g., about 3, 4, 5, 6, 7, 8, 9, 10, 11, 12, 13, 14, 15, 16, 17, 18, 19, or 20) base pairs, and wherein the siNA can include one or more chemical modifications comprising a structure having any of Formulae or any combination thereof. For example, an exemplary chemically-modified siNA molecule of the invention comprises a linear oligonucleotide having about 25 to about 35 (e.g., about 25, 26, 27, 28, 29, 30, 31, 32, 33, 34, or 35) nucleotides that is chemically-modified with one or more chemical modifications having any of Formulae I-VII or any combination thereof, wherein the linear oligonucleotide forms an asymmetric hairpin structure having about 3 to about 18 (e.g., about 3, 4, 5, 6, 7, 8, 9, 10, 11, 12, 13, 14, 15, 16, 17, or 18) base pairs and a 5′-terminal phosphate group that can be chemically modified as described herein (for example a 5′-terminal phosphate group having Formula IV). In another embodiment, an asymmetric hairpin siNA molecule of the invention contains a stem loop motif, wherein the loop portion of the siNA molecule is biodegradable. In another embodiment, an asymmetric hairpin siNA molecule of the invention comprises a loop portion comprising a non-nucleotide linker.

[0115] In another embodiment, a siNA molecule of the invention comprises an asymmetric double stranded structure having separate polynucleotide strands comprising sense and antisense regions, wherein the antisense region is about 16 to about 25 (e.g., about 16, 17, 18, 19, 20, 21, 22, 23, 24, or 25) nucleotides in length, wherein the sense region is about 3 to about 18 (e.g., about 3, 4, 5, 6, 7, 8, 9, 10, 11, 12, 13, 14, 15, 16, 17, or 18) nucleotides in length, wherein the sense region the antisense region have at least 3 complementary nucleotides, and wherein the siNA can include one or more chemical modifications comprising a structure having any of Formulae or any combination thereof. For example, an exemplary chemically-modified siNA molecule of the invention comprises an asymmetric double stranded structure having separate polynucleotide strands comprising sense and antisense regions, wherein the antisense region is about 18 to about 22 (e.g., about 18, 19, 20, 21, or 22) nucleotides in length and wherein the sense region is about 3 to about 15 (e.g., about 3, 4, 5, 6, 7, 8, 9, 10, 11, 12, 13, 14, or 15) nucleotides in length, wherein the sense region the antisense region have at least 3 complementary nucleotides, and wherein the siNA can include one or more chemical modifications comprising a structure having any of Formulae I-VII or any combination thereof. In another embodiment, the asymmetic double stranded siNA molecule can also have a 5′-terminal phosphate group that can be chemically modified as described herein (for example a 5′-terminal phosphate group having Formula IV).

[0116] In another embodiment, a siNA molecule of the invention comprises a circular nucleic acid molecule, wherein the siNA is about 38 to about 70 (e.g., about 38, 40, 45, 50, 55, 60, 65, or 70) nucleotides in length having about 18 to about 23 (e.g., about 17, 18, 19, 20, 21, 22, 23 or 24) base pairs, and wherein the siNA can include a chemical modification, which comprises a structure having any of Formulae I-VII or any combination thereof. For example, an exemplary chemically-modified siNA molecule of the invention comprises a circular oligonucleotide having about 42 to about 50 (e.g., about 42, 43, 44, 45, 46, 47, 48, 49, or 50) nucleotides that is chemically-modified with a chemical modification having any of Formulae I-VII or any combination thereof, wherein the circular oligonucleotide forms a dumbbell shaped structure having about 19 base pairs and 2 loops.

[0117] In another embodiment, a circular siNA molecule of the invention contains two loop motifs, wherein one or both loop portions of the siNA molecule is biodegradable. For example, a circular siNA molecule of the invention is designed such that degradation of the loop portions of the siNA molecule in vivo can generate a double-stranded siNA molecule with 3′-terminal overhangs, such as 3′-terminal nucleotide overhangs comprising about 2 nucleotides.

[0118] In one embodiment, a siNA molecule of the invention comprises at least one (e.g., about 1, 2, 3, 4, 5, 6, 7, 8, 9, 10, or more) abasic moiety, for example a compound having Formula V:

[chemical structure]

wherein each R₃, R₄, R₅, R₆, R₇, R₈, R₁₀, R₁₁, R₁₂, and R₁₃ is independently H, OH, alkyl, substituted alkyl, alkaryl or aralkyl, F, Cl, Br, CN, CF₃, OCF₃, OCN, O-alkyl, S-alkyl, N-alkyl, O-alkenyl, S-alkenyl, N-alkenyl, SO-alkyl, alkyl-OSH, alkyl-OH, O-alkyl-OH, O-alkyl-SH, S-alkyl-OH, S-allcyl-SH, alkyl-S-alkyl, alkyl-O-alkyl, ONO₂, NO₂, N₃, NH₂, aminoalkyl, aminoacid, aminoacyl, ONH₂, O-aminoalkyl, O-aminoacid, O-aminoacyl, heterocycloalkyl, heterocycloalkaryl, aminoalkylamino, polyalklylamino, substituted silyl, or group having Formula I or II; R₉ is O, S, CH₂, S═O, CHF, or CF₂.

[0119] In one embodiment, a siNA molecule of the invention comprises at least one (e.g., about 1, 2, 3, 4, 5, 6, 7, 8, 9, 10, or more) inverted abasic moiety, for example a compound having Formula VI:

[chemical structure]

wherein each R₃, R₄, R₅, R₆, R₇, R₈, R₁₀, R₁₁, R₁₂, and R₁₃ is independently H, OH, alkyl, substituted alkyl, alkaryl or aralkyl, F, Cl, Br, CN, CF₃, OCF₃, OCN, O-alkyl, S-alkyl, N-alkyl, O-alkenyl, S-alkenyl, N-alkenyl, SO-alkyl, alkyl-OSH, alkyl-OH, O-alkyl-OH, O-alkyl-SH, S-alkyl-OH, S-alkyl-SH, alkyl-S-alkyl, alkyl-O-alkyl, ONO₂, NO₂, N₃, NH₂, aminoalkyl, aminoacid, aminoacyl, ONH₂, O-aminoalkyl, O-aminoacid, O-aminoacyl, heterocycloalkyl, heterocycloalkaryl, aminoalkylamino, polyalklylamino, substituted silyl, or group having Formula I or II; R₉ is O, S, CH₂, S═O, CHF, or CF₂, and either R₃, R₅, R₈ or R₁₃ serve as points of attachment to the siNA molecule of the invention.

[0120] In another embodiment, a siNA molecule of the invention comprises at least one (e.g., about 1, 2, 3, 4, 5, 6, 7, 8, 9, 10, or more) substituted polyalkyl moieties, for example a compound having Formula VII:

[chemical structure]

wherein each n is independently an integer from 1 to 12, each R₁, R₂ and R₃ is independently H, OH, alkyl, substituted alkyl, alkaryl or aralkyl, F, Cl, Br, CN, CF₃, OCF₃, OCN, O-alkyl, S-alkyl, N-alkyl, O-alkenyl, S-alkenyl, N-alkenyl, SO-alkyl, alkyl-OSH, alkyl-OH, O-alkyl-OH, O-alkyl-SH, S-alkyl-OH, S-alkyl-SH, alkyl-S-alkyl, alkyl-O-alkyl, ONO₂, NO₂, N₃, NH₂, aminoalkyl, aminoacid, aminoacyl, ONH₂, O-aminoalkyl, O-aminoacid, O-aminoacyl, heterocycloalkyl, heterocycloalkaryl, aminoalkylamino, polyalkylamino, substituted silyl, or a group having Formula I, and R₁, R₂ or R₃ serves as points of attachment to the siNA molecule of the invention.

[0121] In another embodiment, the invention features a compound having Formula VII, wherein R₁ and R₂ are hydroxyl (OH) groups, n=1, and R₃ comprises O and is the point of attachment to the 3′-end, the 5′-end, or both of the 3′ and 5′-ends of one or both strands of a double-stranded siNA molecule of the invention or to a single-stranded siNA molecule of the invention. This modification is referred to herein as “glyceryl” (for example modification 6 in FIG. 22).

[0122] In another embodiment, a moiety having any of Formula V, VI or VII of the invention is at the 3′-end, the 5′-end, or both of the 3′ and 5′-ends of a siNA molecule of the invention. For example, a moiety having Formula V, VI or VII can be present at the 3′-end, the 5′-end, or both of the 3′ and 5′-ends of the antisense strand, the sense strand, or both antisense and sense strands of the siNA molecule. In addition, a moiety having Formula VII can be present at the 3′-end or the 5′-end of a hairpin siNA molecule as described herein.

[0123] In another embodiment, a siNA molecule of the invention comprises an abasic residue having Formula V or VI, wherein the abasic residue having Formula V or VI is connected to the siNA construct in a 3-3′, 3-2′, 2-3′, or 5-5′ configuration, such as at the 3′-end, the 5′-end, or both of the 3′ and 5′-ends of one or both siNA strands.

[0124] In one embodiment, a siNA molecule of the invention comprises one or more (e.g., about 1, 2, 3, 4, 5, 6, 7, 8, 9, 10, or more) locked nucleic acid (LNA) nucleotides, for example at the 5′-end, the 3′-end, both of the 5′ and 3′-ends, or any combination thereof, of the siNA molecule.

[0125] In another embodiment, a siNA molecule of the invention comprises one or more (e.g., about 1, 2, 3, 4, 5, 6, 7, 8, 9, 10, or more) acyclic nucleotides, for example at the 5′-end, the 3′-end, both of the 5′ and 3′-ends, or any combination thereof, of the siNA molecule.

[0126] In one embodiment, the sense strand of a double stranded siNA molecule of the invention comprises a terminal cap moiety, (see for example FIG. 22) such as an inverted deoxyabasic moiety or inverted nucleotide, at the 3′-end, 5′-end, or both 3′ and 5′-ends of the sense strand.

[0127] In one embodiment, the invention features a chemically-modified short interfering nucleic acid (siNA) molecule of the invention, wherein the chemically-modified siNA comprises a sense region, where any (e.g., one or more or all) pyrimidine nucleotides present in the sense region are 2′-deoxy-2′-fluoro pyrimidine nucleotides (e.g., wherein all pyrimidine nucleotides are 2′-deoxy-2′-fluoro pyrimidine nucleotides or alternately a plurality of pyrimidine nucleotides are 2′-deoxy-2′-fluoro pyrimidine nucleotides), and where any (e.g., one or more or all) purine nucleotides present in the sense region are 2′-deoxy purine nucleotides (e.g., wherein all purine nucleotides are 2′-deoxy purine nucleotides or alternately a plurality of purine nucleotides are 2′-deoxy purine nucleotides).

[0128] In one embodiment, the invention features a chemically-modified short interfering nucleic acid (siNA) molecule of the invention, wherein the chemically-modified siNA comprises a sense region, where any (e.g., one or more or all) pyrimidine nucleotides present in the sense region are 2′-deoxy-2′-fluoro pyrimidine nucleotides (e.g., wherein all pyrimidine nucleotides are 2′-deoxy-2′-fluoro pyrimidine nucleotides or alternately a plurality of pyrimidine nucleotides are 2′-deoxy-2′-fluoro pyrimidine nucleotides), and where any (e.g., one or more or all) purine nucleotides present in the sense region are 2′-deoxy purine nucleotides (e.g., wherein all purine nucleotides are 2′-deoxy purine nucleotides or alternately a plurality of purine nucleotides are 2′-deoxy purine nucleotides), wherein any nucleotides comprising a 3′-terminal nucleotide overhang that are present in said sense region are 2′-deoxy nucleotides.

[0129] In one embodiment, the invention features a chemically-modified short interfering nucleic acid (siNA) molecule of the invention, wherein the chemically-modified siNA comprises a sense region, where any (e.g., one or more or all) pyrimidine nucleotides present in the sense region are 2′-deoxy-2′-fluoro pyrimidine nucleotides (e.g., wherein all pyrimidine nucleotides are 2′-deoxy-2′-fluoro pyrimidine nucleotides or alternately a plurality of pyrimidine nucleotides are 2′-deoxy-2′-fluoro pyrimidine nucleotides), and where any (e.g., one or more or all) purine nucleotides present in the sense region are 2′-O-methyl purine nucleotides (e.g., wherein all purine nucleotides are 2′-O-methyl purine nucleotides or alternately a plurality of purine nucleotides are 2′-O-methyl purine nucleotides).

[0130] In one embodiment, the invention features a chemically-modified short interfering nucleic acid (siNA) molecule of the invention, wherein the chemically-modified siNA comprises a sense region, where any (e.g., one or more or all) pyrimidine nucleotides present in the sense region are 2′-deoxy-2′-fluoro pyrimidine nucleotides (e.g., wherein all pyrimidine nucleotides are 2′-deoxy-2′-fluoro pyrimidine nucleotides or alternately a plurality of pyrimidine nucleotides are 2′-deoxy-2′-fluoro pyrimidine nucleotides), and where any (e.g., one or more or all) purine nucleotides present in the sense region are 2′-O-methyl purine nucleotides (e.g., wherein all purine nucleotides are 2′-O-methyl purine nucleotides or alternately a plurality of purine nucleotides are 2′-O-methyl purine nucleotides), wherein any nucleotides comprising a 3′-terminal nucleotide overhang that are present in said sense region are 2′-deoxy nucleotides.

[0131] In one embodiment, the invention features a chemically-modified short interfering nucleic acid (siNA) molecule of the invention, wherein the chemically-modified siNA comprises an antisense region, where any (e.g., one or more or all) pyrimidine nucleotides present in the antisense region are 2′-deoxy-2′-fluoro pyrimidine nucleotides (e.g., wherein all pyrimidine nucleotides are 2′-deoxy-2′-fluoro pyrimidine nucleotides or alternately a plurality of pyrimidine nucleotides are 2′-deoxy-2′-fluoro pyrimidine nucleotides), and wherein any (e.g., one or more or all) purine nucleotides present in the antisense region are 2′-O-methyl purine nucleotides (e.g., wherein all purine nucleotides are 2′-O-methyl purine nucleotides or alternately a plurality of purine nucleotides are 2′-O-methyl purine nucleotides).

[0132] In one embodiment, the invention features a chemically-modified short interfering nucleic acid (siNA) molecule of the invention, wherein the chemically-modified siNA comprises an antisense region, where any (e.g., one or more or all) pyrimidine nucleotides present in the antisense region are 2′-deoxy-2′-fluoro pyrimidine nucleotides (e.g., wherein all pyrimidine nucleotides are 2′-deoxy-2′-fluoro pyrimidine nucleotides or alternately a plurality of pyrimidine nucleotides are 2′-deoxy-2′-fluoro pyrimidine nucleotides), and wherein any (e.g., one or more or all) purine nucleotides present in the antisense region are 2′-O-methyl purine nucleotides (e.g., wherein all purine nucleotides are 2′-O-methyl purine nucleotides or alternately a plurality of purine nucleotides are 2′-O-methyl purine nucleotides), wherein any nucleotides comprising a 3′-terminal nucleotide overhang that are present in said antisense region are 2′-deoxy nucleotides.

[0133] In one embodiment, the invention features a chemically-modified short interfering nucleic acid (siNA) molecule of the invention, wherein the chemically-modified siNA comprises an antisense region, where any (e.g., one or more or all) pyrimidine nucleotides present in the antisense region are 2′-deoxy-2′-fluoro pyrimidine nucleotides (e.g., wherein all pyrimidine nucleotides are 2′-deoxy-2′-fluoro pyrimidine nucleotides or alternately a plurality of pyrimidine nucleotides are 2′-deoxy-2′-fluoro pyrimidine nucleotides), and where any (e.g., one or more or all) purine nucleotides present in the antisense region are 2′-deoxy purine nucleotides (e.g., wherein all purine nucleotides are 2′-deoxy purine nucleotides or alternately a plurality of purine nucleotides are 2′-deoxy purine nucleotides).

[0134] In one embodiment, the invention features a chemically-modified short interfering nucleic acid (siNA) molecule of the invention capable of mediating RNA interference (RNAi) inside a cell or reconstituted in vitro system comprising a sense region and an antisense region. In one embodiment, the sense region comprises one or more 2′-deoxy-2′-fluoro pyrimidine nucleotides (e.g., wherein all pyrimidine nucleotides are 2′-deoxy-2′-fluoro pyrimidine nucleotides or alternately a plurality of pyrimidine nucleotides are 2′-deoxy-2′-fluoro pyrimidine nucleotides), and one or more 2′-deoxy purine nucleotides (e.g., wherein all purine nucleotides are 2′-deoxy purine nucleotides or alternately a plurality of purine nucleotides are 2′-deoxy purine nucleotides). The sense region can comprise inverted deoxy abasic modifications that are optionally present at the 3′-end, the 5′-end, or both of the 3′ and 5′-ends of the sense region. The sense region can optionally further comprise a 3′-terminal overhang having about 1 to about 4 (e.g., about 1, 2, 3, or 4) 2′-deoxyribonucleotides. The antisense region comprisesone or more 2′-deoxy-2′-fluoro pyrimidine nucleotides (e.g., wherein all pyrimidine nucleotides are 2′-deoxy-2′-fluoro pyrimidine nucleotides or alternately a plurality of pyrimidine nucleotides are 2′-deoxy-2′-fluoro pyrimidine nucleotides), and one or more 2′-O-methyl purine nucleotides (e.g., wherein all purine nucleotides are 2′-O-methyl purine nucleotides or alternately a plurality of purine nucleotides are 2′-O-methyl purine nucleotides). The antisense region can comprise a terminal cap modification, such as any modification described herein or shown in FIG. 22, that is optionally present at the 3′-end, the 5′-end, or both of the 3′ and 5′-ends of the antisense sequence. The antisense region optionally further comprises a 3′-terminal nucleotide overhang having about 1 to about 4 (e.g., about 1, 2, 3, or 4) 2′-deoxynucleotides, wherein the overhang nucleotides can further comprise one or more (e.g., 1, 2, 3, or 4) phosphorothioate internucleotide linkages. Non-limiting examples of these chemically-modified siNAs are shown in FIGS. 18 and 19 and Table IV herein.

[0135] In another embodiment of the chemically-modified short interfering nucleic acid comprising a sense region and an antisense region, the sense region comprises one or more 2′-deoxy-2′-fluoro pyrimidine nucleotides (e.g., wherein all pyrimidine nucleotides are 2′-deoxy-2′-fluoro pyrimidine nucleotides or alternately a plurality of pyrimidine nucleotides are 2′-deoxy-2′-fluoro pyrimidine nucleotides), and one or more purine ribonucleotides (e.g., wherein all purine nucleotides are purine ribonucleotides or alternately a plurality of purine nucleotides are purine ribonucleotides). The sense region can also compriseinverted deoxy abasic modifications that are optionally present at the 3′-end, the 5′-end, or both of the 3′ and 5′-ends of the sense region. The sense region optionally further comprises a 3′-terminal overhang having about 1 to about 4 (e.g., about 1, 2, 3, or 4) 2′-deoxyribonucleotides. The antisense region comprises one or more 2′-deoxy-2′-fluoro pyrimidine nucleotides (e.g., wherein all pyrimidine nucleotides are 2′-deoxy-2′-fluoro pyrimidine nucleotides or alternately a plurality of pyrimidine nucleotides are 2′-deoxy-2′-fluoro pyrimidine nucleotides), and one or more 2′-O-methyl purine nucleotides (e.g., wherein all purine nucleotides are 2′-O-diethyl purine nucleotides or alternately a plurality of purine nucleotides are 2′-O-methyl purine nucleotides). The antisense region can also comprise a terminal cap modification, such as any modification described herein or shown in FIG. 22, that is optionally present at the 3′-end, the 5′-end, or both of the 3′ and 5′-ends of the antisense sequence. The antisense region optionally further comprises a 3′-terminal nucleotide overhang having about 1 to about 4 (e.g., about 1, 2, 3, or 4) 2′-deoxynucleotides, wherein the overhang nucleotides can further comprise one or more (e.g., 1, 2, 3, or 4) phosphorothioate internucleotide linkages. Non-limiting examples of these chemically-modified siNAs are shown in FIGS. 18 and 19 and Table IV herein.

[0136] In another embodiment of the chemically-modified short interfering nucleic acid comprising a sense region and an antisense region, the sense region comprises one or more 2′-deoxy-2′-fluoro pyrimidine nucleotides (e.g., wherein all pyrimidine nucleotides are 2′-deoxy-2′-fluoro pyrimidine nucleotides or alternately a plurality of pyrimidine nucleotides are 2′-deoxy-2′-fluoro pyrimidine nucleotides), and one or more purine nucleotides selected from the group consisting of 2′-deoxy nucleotides, locked nucleic acid (LNA) nucleotides, 2′-methoxyethyl nucleotides, 4′-thionucleotides, and 2′-O-methyl nucleotides (e.g., wherein all purine nucleotides are selected from the group consisting of 2′-deoxy nucleotides, locked nucleic acid (LNA) nucleotides, 2′-methoxyethyl nucleotides, 4′-thionucleotides, and 2′-O-methyl nucleotides or alternately a plurality of purine nucleotides are selected from the group consisting of 2′-deoxy nucleotides, locked nucleic acid (LNA) nucleotides, 2′-methoxyethyl nucleotides, 4′-thionucleotides, and 2′-O-methyl nucleotides). The sense region can comprise inverted deoxy abasic modifications that are optionally present at the 3′-end, the 5′-end, or both of the 3′ and 5′-ends of the sense region. The sense region can optionally further comprise a 3′-terminal overhang having about 1 to about 4 (e.g., about 1, 2, 3, or 4) 2′-deoxyribonucleotides. The antisense region comprises one or more 2′-deoxy-2′-fluoro pyrimidine nucleotides (e.g., wherein all pyrimidine nucleotides are 2′-deoxy-2′-fluoro pyrimidine nucleotides or alternately a plurality of pyrimidine nucleotides are 2′-deoxy-2′-fluoro pyrimidine nucleotides), and one or more purine nucleotides selected from the group consisting of 2′-deoxy nucleotides, locked nucleic acid (LNA) nucleotides, 2′-methoxyethyl nucleotides, 4′-thionucleotides, and 2′-O-methyl nucleotides (e.g., wherein all purine nucleotides are selected from the group consisting of 2′-deoxy nucleotides, locked nucleic acid (LNA) nucleotides, 2′-methoxyethyl nucleotides, 4′-thionucleotides, and 2′-O-methyl nucleotides or alternately a plurality of purine nucleotides are selected from the group consisting of 2′-deoxy nucleotides, locked nucleic acid (LNA) nucleotides, 2′-methoxyethyl nucleotides, 4′-thionucleotides, and 2′-O-methyl nucleotides). The antisense can also comprise a terminal cap modification, such as any modification described herein or shown in FIG. 22, that is optionally present at the 3′-end, the 5′-end, or both of the 3′ and 5′-ends of the antisense sequence. The antisense region optionally further comprises a 3′-terminal nucleotide overhang having about 1 to about 4 (e.g., about 1, 2, 3, or 4) 2′-deoxynucleotides, wherein the overhang nucleotides can further comprise one or more (e.g., 1, 2, 3, or 4) phosphorothioate intemucleotide linkages.

[0137] In another embodiment, any modified nucleotides present in the siNA molecules of the invention, preferably in the antisense strand of the siNA molecules of the invention, but also optionally in the sense and/or both antisense and sense strands, comprise modified nucleotides having properties or characteristics similar to naturally occurring ribonucleotides. For example, the invention features siNA molecules including modified nucleotides having a Northern conformation (e.g., Northern pseudorotation cycle, see for example Saenger, Principles of Nucleic Acid Structure, Springer-Verlag ed., 1984). As such, chemically modified nucleotides present in the siNA molecules of the invention, preferably in the antisense strand of the siNA molecules of the invention, but also optionally in the sense and/or both antisense and sense strands, are resistant to nuclease degradation while at the same time maintaining the capacity tomediate RNAi. Non-limiting examples of nucleotides having a northern configuration include locked nucleic acid (LNA) nucleotides (e.g., 2′-O,4′-C-methylene-(D-ribofuranosyl) nucleotides); 2′-methoxyethoxy (MOE) nucleotides; 2′-methyl-thio-ethyl, 2′-deoxy-2′-fluoro nucleotides, 2′-deoxy-2′-chloro nucleotides, 2′-azido nucleotides, and 2′-O-methyl nucleotides.

[0138] In one embodiment, the invention features a chemically-modified short interfering nucleic acid molecule (siNA) capable of mediating RNA interference (RNAi) inside a cell or reconstituted in vitro system, wherein the chemical modification comprises a conjugate attached to the chemically-modified siNA molecule. The conjugate can be attached to the chemically-modified siNA molecule via a covalent attachment. In one embodiment, the conjugate is attached to the chemically-modified siNA molecule via a biodegradable linker. In one embodiment, the conjugate molecule is attached at the 3′-end ofeither the sense strand, the antisense strand, or both strands of the chemically-modified siNA molecule. In another embodiment, the conjugate molecule is attached at the 5′-end of either the sense strand, the antisense strand, or both strands of the chemically-modified siNA molecule. In yet another embodiment, the conjugate molecule is attached both the 3′-end and 5′-end of either the sense strand, the antisense strand, or both strands of the chemically-modified siNA molecule, or any combination thereof. In one embodiment, the conjugate molecule of the invention comprises a molecule that facilitates delivery of a chemically-modified siNA molecule into a biological system, such as a cell. In another embodiment, the conjugate molecule attached to the chemically-modified siNA molecule is a poly ethylene glycol, human serum albumin, or a ligand for a cellular receptor that can mediate cellular uptake. Examples of specific conjugate molecules contemplated by, the instant invention that can be attached to chemically-modified siNA molecules are described in Vargeese et al., U.S. Ser. No. 10/201,394, incorporated by reference herein. The type of conjugates used and the extent of conjugation of siNA molecules of the invention can be evaluated for improved pharmacokinetic profiles, bioavailability, and/or stability of siNA constructs while at the same time maintaining the ability of the siNA to mediate RNAi activity. As such, one skilled in the art can screen siNA constructs that are modified with various conjugates to determine whether the siNA conjugate complex possesses improved properties while maintaining the ability to mediate RNAi, for example in animal models as are generally known in the art.

[0139] In one embodiment, the invention features a chemically-modified short interfering nucleic acid (siNA) molecule of the invention capable of mediating RNA interference (RNAi) inside a cell or reconstituted in vitro system, wherein the chemically-modified siNA comprises a sense region, where one or more pyrimidine nucleotides present in the sense region are 2′-deoxy-2′-fluoro pyrimidine nucleotides (e.g., wherein all pyrimidine nucleotides are 2′-deoxy-2′-fluoro pyrimidine nucleotides or alternately a plurality of pyrimidine nucleotides are 2′-deoxy-2′-fluoro pyrimidine nucleotides), and where one or more purine nucleotides present in the sense region are 2′-deoxy purine nucleotides (e.g., wherein all purine nucleotides are T-deoxy purine nucleotides or alternately a plurality of purine nucleotides are 2′-deoxy purine nucleotides), and inverted deoxy abasic modifications that are optionally present at the 3′-end, the 5′-end, or both of the 3′ and 5′-ends of the sense region, the sense region optionally further comprising a 3′-terminal overhang having about 1 to about 4 (e.g., about 1, 2, 3, or 4) 2′-deoxyribonucleotides; and wherein the chemically-modified short interfering nucleic acid molecule comprises an antisense region, where one or more pyrimidine nucleotides present in the antisense region are 2′-deoxy-2′-fluoro pyrimidine nucleotides (e.g., wherein all pyrimidine nucleotides are 2′-deoxy-2′-fluoro pyrimidine nucleotides or alternately a plurality of pyrimidine nucleotides are 2′-deoxy-2′-fluoro pyrimidine nucleotides), and wherein one or more purine nucleotides present in the antisense region are 2′-O-methyl purine nucleotides (e.g., wherein all purine nucleotides are 2′-O-methyl purine nucleotides or alternately a plurality of purine nucleotides are 2′-O-methyl purine nucleotides), and a terminal cap modification, such as any modification described herein or shown in FIG. 22, that is optionally present at the 3′-end, the 5′-end, or both of the 3′ and 5′-ends of the antisense sequence, the antisense region optionally further comprising a 3′-terminal nucleotide overhang having about 1 to about 4 (e.g., about 1, 2, 3, or 4) 2′-deoxynucleotides, wherein the overhang nucleotides can further comprise one or more (e.g., 1, 2, 3, or 4) phosphorothioate intemucleotide linkages. Non-limiting examples of these chemically-modified siNAs are shown in FIGS. 18 and 19 and Table IV herein.

[0140] In one embodiment, the invention features a chemically-modified short interfering nucleic acid (siNA) molecule of the invention capable of mediating RNA interference (RNAi) inside a cell or reconstituted in vitro system, wherein the chemically-modified siNA comprises a sense region, where one or more pyrimidine nucleotides present in the sense region are 2′-deoxy-2′-fluoro pyrimidine nucleotides (e.g., wherein all pyrimidine nucleotides are 2′-deoxy-2′-fluoro pyrimidine nucleotides or alternately a plurality of pyrimidine nucleotides are 2′-deoxy-2′-fluoro pyrimidine nucleotides), and where one or more purine nucleotides present in the sense region are 2′-O-methyl purine nucleotides (e.g., wherein all purine nucleotides are 2′-O-methyl purine nucleotides or alternately a plurality of purine nucleotides are 2′-O-methyl purine nucleotides), and inverted deoxy abasic modifications that are optionally present at the 3′-end, the 5′-end, or both of the 3′ and 5′-ends of the sense region, the sense region optionally further comprising a 3′-terminal overhang having about 1 to about 4 (e.g., about 1, 2, 3, or 4) 2′-deoxyribonucleotides; and wherein the chemically-modified short interfering nucleic acid molecule comprises an antisense region, where one or more pyrimidine nucleotides present in the antisense region are 2′-deoxy-2′-fluoro pyrimidine nucleotides (e.g., wherein all pyrimidine nucleotides are 2′-deoxy-2′-fluoro pyrimidine nucleotides or alternately a plurality of pyrimidine nucleotides are 2′-deoxy-2′-fluoro pyrimidine nucleotides), and wherein one or more purine nucleotides present in the antisense region are 2′-O-methyl purine nucleotides (e.g., wherein all purine nucleotides are 2′-O-methyl purine nucleotides or alternately a plurality of purine nucleotides are 2′-O-methyl purine nucleotides), and a terminal cap modification, such as any modification described herein or shown in FIG. 22, that is optionally present at the 3′-end, the 5′-end, or both of the 3′ and 5′-ends of the antisense sequence, the antisense region optionally further comprising a 3′-terminal nucleotide overhang having about 1 to about 4 (e.g., about 1, 2, 3, or 4) 2′-deoxynucleotides, wherein the overhang nucleotides can further comprise one or more (e.g., 1, 2, 3, or 4) phosphorothioate internucleotide linkages. Non-limiting examples of these chemically-modified siNAs are shown in FIGS. 18 and 19 and Table IV herein.

[0141] In one embodiment, the invention features a chemically-modified short interfering nucleic acid (siNA) molecule of the invention capable of mediating RNA interference (RNAi) inside a cell or reconstituted in vitro system, wherein the siNA comprises a sense region, where one or more pyrimidine nucleotides present in the sense region are 2′-deoxy-2′-fluoro pyrimidine nucleotides (e.g., wherein all pyrimidine nucleotides are 2′-deoxy-2′-fluoro pyrimidine nucleotides or alternately a plurality of pyrimidine nucleotides are 2′-deoxy-2′-fluoro pyrimidine nucleotides), and where one or more purine nucleotides present in the sense region are purine ribonucleotides (e.g., wherein all purine nucleotides are purine ribonucleotides or alternately a plurality of purine nucleotides are purine ribonucleotides), and inverted deoxy abasic modifications that are optionally present at the 3′-end, the 5′-end, or both of the 3′ and 5′-ends of the sense region, the sense region optionally further comprising a 3′-terminal overhang having about 1 to about 4 (e.g., about 1, 2, 3, or 4) 2′-deoxyribonucleotides; and wherein the siNA comprises an antisense region, where one or more pyrimidine nucleotides present in the antisense region are 2′-deoxy-2′-fluoro pyrimidine nucleotides (e.g., wherein all pyrimidine nucleotides are 2′-deoxy-2′-fluoro pyrimidine nucleotides or alternately a plurality of pyrimidine nucleotides are 2′-deoxy-2′-fluoro pyrimidine nucleotides), and wherein any purine nucleotides present in the antisense region are 2′-O-methyl purine nucleotides (e.g., wherein all purine nucleotides are 2′-O-methyl purine nucleotides or alternately a plurality of purine nucleotides are 2′-O-methyl purine nucleotides), and a terminal cap modification, such as any modification described herein or shown in FIG. 22, that is optionally present at the 3′-end, the 5′-end, or both of the 3′ and 5′-ends of the antisense sequence, the antisense region optionally further comprising a 3′-terminal nucleotide overhang having about 1 to about 4 (e.g., about 1, 2, 3, or 4) 2′-deoxynucleotides, wherein the overhang nucleotides can further comprise one or more (e.g., 1, 2, 3, or 4) phosphorothioate internucleotide linkages. Non-limiting examples of these chemically-modified siNAs are shown in FIGS. 18 and 19 and Table IV herein.

[0142] In one embodiment, the invention features a chemically-modified short interfering nucleic acid (siNA) molecule of the invention capable of mediating RNA interference (RNAi) inside a cell or reconstituted in vitro system, wherein the chemically-modified siNA comprises a sense region, where one or more pyrimidine nucleotides present in the sense region are 2′-deoxy-2′-fluoro pyrimidine nucleotides (e.g., wherein all pyrimidine nucleotides are 2′-deoxy-2′-fluoro pyrimidine nucleotides or alternately a plurality of pyrimidine nucleotides are 2′-deoxy-2′-fluoro pyrimidine nucleotides), and for example where one or more purine nucleotides present in the sense region are selected from the group consisting of 2′-deoxy nucleotides, locked nucleic acid (LNA) nucleotides, 2′-methoxyethyl nucleotides, 4′-thionucleotides, and 2′-O-methyl nucleotides (e.g., wherein all purine nucleotides are selected from the group consisting of 2′-deoxy nucleotides, locked nucleic acid (LNA) nucleotides, 2′-methoxyethyl nucleotides, 4′-thionucleotides, and 2′-O-methyl nucleotides or alternately a plurality of purine nucleotides are selected from the group consisting of 2′-deoxy nucleotides, locked nucleic acid (LNA) nucleotides, 2′-methoxyethyl nucleotides, 4′-thionucleotides, and 2′-O-methyl nucleotides), and wherein inverted deoxy abasic modifications are optionally present at the 3′-end, the 5′-end, or both of the 3′ and 5′-ends of the sense region, the sense region optionally further comprising a 3′-terminal overhang having about 1 to about 4 (e.g., about 1, 2, 3, or 4) 2′-deoxyribonucleotides; and wherein the chemically-modified short interfering nucleic acid molecule comprises an antisense region, where one or more pyrimidine nucleotides present in the antisense region are 2′-deoxy-2′-fluoro pyrimidine nucleotides (e.g., wherein all pyrimidine nucleotides are 2′-deoxy-2′-fluoro pyrimidine nucleotides or alternately a plurality of pyrimidine nucleotides are 2′-deoxy-2′-fluoro pyrimidine nucleotides), and wherein one or more purine nucleotides present in the antisense region are selected from the group consisting of 2′-deoxy nucleotides, locked nucleic acid (LNA) nucleotides, 2′-methoxyethyl nucleotides, 4′-thionucleotides, and 2′-O-methyl nucleotides (e.g., wherein all purine nucleotides are selected from the group consisting of 2′-deoxy nucleotides, locked nucleic acid (LNA) nucleotides, 2′-methoxyethyl nucleotides, 4′-thionucleotides, and 2′-O-methyl nucleotides or alternately a plurality of purine nucleotides are selected from the group consisting of 2′-deoxy nucleotides, locked nucleic acid (LNA) nucleotides, 2′-methoxyethyl nucleotides, 4′-thionucleotides, and 2′-O-methyl nucleotides), and a terminal cap modification, such as any modification described herein or shown in FIG. 22, that is optionally present at the 3′-end, the 5′-end, or both of the 3′ and 5′-ends of the antisense sequence, the antisense region optionally further comprising a 3′-terminal nucleotide overhang having about 1 to about 4 (e.g., about 1, 2, 3, or 4) 2′-deoxynucleotides, wherein the overhang nucleotides can further comprise one or more (e.g., 1, 2, 3, or 4) phosphorothioate internucleotide linkages.

[0143] In one embodiment, the invention features a short interfering nucleic acid (siNA) molecule of the invention, wherein the siNA further comprises a nucleotide, non-nucleotide, or mixed nucleotide/non-nucleotide linker that joins the sense region of the siNA to the antisense region of the siNA. In one embodiment, a nucleotide linker of the invention can be a linker of 2 nucleotides in length, for example 3, 4, 5, 6, 7, 8, 9, or 10 nucleotides in length. In another embodiment, the nucleotide linker can be a nucleic acid aptamer. By “aptamer” or “nucleic acid aptamer” as used herein is meant a nucleic acid molecule that binds specifically to a target molecule wherein the nucleic acid molecule has sequence that comprises a sequence recognized by the target molecule in its natural setting. Alternately, an aptamer can be a nucleic acid molecule that binds to a target molecule where the target molecule does not naturally bind to a nucleic acid. The target molecule can be any molecule of interest. For example, the aptamer can be used to bind to a ligand-binding domain of a protein, thereby preventing interaction of the naturally occurring ligand with the protein. This is a non-limiting example and those in the art will recognize that other embodiments can be readily generated using techniques generallyknown in the art (see, for example, Gold et al., 1995, Annu. Rev. Biochem., 64, 763; Brody and Gold, 2000, J. Biotechnol., 74, 5; Sun, 2000, Curr. Opin. Mol. Ther., 2, 100; Kusser, 2000, J. Biotechnol., 74, 27; Hermann and Patel, 2000, Science, 287, 820; and Jayasena, 1999, Clinical Chemistry, 45, 1628.)

[0144] In yet another embodiment, a non-nucleotide linker of the invention comprises abasic nucleotide, polyether, polyamine, polyamide, peptide, carbohydrate, lipid, polyhydrocarbon, or other polymeric compounds (e.g., polyethylene glycols such as those having between 2 and 100 ethylene glycol units). Specific examples include those described by Seela and Kaiser, Nucleic Acids Res. 1990, 18:6353 and Nucleic Acids Res. 1987, 15:3113; Cload and Schepartz, J. Am. Chem. Soc. 1991, 113:6324; Richardson and Schepartz, J. Am. Chem. Soc. 1991, 113:5109; Ma et al., Nucleic Acids Res. 1993, 21:2585 and Biochemistry 1993, 32:1751; Durand et al., Nucleic Acids Res. 1990, 18:6353; McCurdy et al., Nucleosides & Nucleotides 1991, 10:287; Jschke et al., Tetrahedron Lett. 1993, 34:301; Ono et al., Biochemistry 1991, 30:9914; Arnold et al., International Publication No. WO 89/02439; Usman et al., International Publication No. WO 95/06731; Dudycz et al., International Publication No. WO 95/11910 and Ferentz and Verdine, J. Am. Chem. Soc. 1991, 113:4000, all hereby incorporated by reference herein. A “non-nucleotide” further means any group or compound that can be incorporated into a nucleic acid chain in the place of one or more nucleotide units, including either sugar and/or phosphate substitutions, and allows the remaining bases to exhibit their enzymatic activity. The group or compound can be abasic in that it does not contain a commonly recognized nucleotide base, such as adenosine, guanine, cytosine, uracil or thymine, for example at the C1 position of the sugar.

[0145] In one embodiment, the invention features a chemically-modified short interfering nucleic acid molecule (siNA) capable of mediating RNA interference (RNAi) against a target gene inside a cell or reconstituted in vitro system, wherein the chemical modification comprises a conjugate covalently attached to the chemically-modified siNA molecule. Non-limiting examples of conjugates contemplated by the invention include conjugates and ligands described in Vargeese et al., U.S. Ser. No. 10/427,160, filed Apr. 30, 2003, incorporated by reference herein in its entirety, including the drawings. In another embodiment, the conjugate is covalently attached to the chemically-modified siNA molecule via a biodegradable linker. In one embodiment, the conjugate molecule is attached at the 3′-end of either the sense strand, the antisense strand, or both strands of the chemically-modified siNA molecule. In another embodiment, the conjugate molecule is attached at the 5′-end of either the sense strand, the antisense strand, or both strands of the chemically-modified siNA molecule. In yet another embodiment, the conjugate molecule is attached both the 3′-end and 5′-end of either the sense strand, the antisense strand, or both strands of the chemically-modified siNA molecule, or any combination thereof. In one embodiment, a conjugate molecule of the invention comprises a molecule that facilitates delivery of a chemically-modified siNA molecule into a biological system, such as a cell. In another embodiment, the conjugate molecule attached to the chemically-modified siNA molecule is a polyethylene glycol, human serum albumin, or a ligand for a cellular receptor that can mediate cellular uptake. Examples of specific conjugate molecules contemplated by the instant invention that can be attached to chemically-modified siNA molecules are described in Vargeese et al., U.S. Ser. No. 10/201,394, incorporated by reference herein. The type of conjugates used and the extent of conjugation of siNA molecules of the invention can be evaluated for improved pharmacokinetic profiles, bioavailability, and/or stability of siNA constructs while at the same time maintaining the ability of the siNA to mediate RNAi activity. As such, one skilled in the art can screen siNA constructs that are modified with various conjugates to determine whether the siNA conjugate complex possesses improved properties while maintaining the ability to mediate RNAi, for example in animal models as are generally known in the art.

[0146] In one embodiment, the invention features a short interfering nucleic acid (siNA) molecule capable of mediating RNA interference (RNAi) inside a cell or reconstituted in vitro system, wherein one or both strands of the siNA molecule that are assembled from two separate oligonucleotides do not comprise any ribonucleotides. For example, a siNA molecule can be assembled from a single oligonculeotide where the sense and antisense regions of the siNA comprise separate oligonucleotides that do not have any ribonucleotides (e.g., nucleotides having a 2′-OH group) present in the oligonucleotides. In another example, a siNA molecule can be assembled from a single oligonculeotide where the sense and antisense regions of the siNA are linked or circularized by a nucleotide or non-nucleotide linker as described herein, wherein the oligonucleotide does not have any ribonucleotides (e.g., nucleotides having a 2′-OH group) present in the oligonucleotide. Applicant has surprisingly found that the presense of ribonucleotides (e.g., nucleotides having a 2′-hydroxyl group) within the siNA molecule is not required or essential to support RNAi activity. As such, in one embodiment, all positions within the siNA can include chemically modified nucleotides and/or non-nucleotides such as nucleotides and or non-nucleotides having Formula I, II, III, IV, V, VI, or VII or any combination thereof to the extent that the ability of the siNA molecule to support RNAi activity in a cell is maintained.

[0147] In one embodiment, the invention features a siNA molecule that does not require the presence of a 2′-OH group (ribonucleotide) to be present withing the siNA molecule to support RNA interference.

[0148] In one embodiment, a siNA molecule of the invention is a single stranded siNA molecule that mediates RNAi activity in a cell or reconstituted in vitro system, wherein the siNA molecule comprises a single stranded polynucleotide having complementarity to a target nucleic acid sequence. In another embodiment, the single stranded siNA molecule of the invention comprises a 5′-terminal phosphate group. In another embodiment, the single stranded siNA molecule of the invention comprises a 5′-terminal phosphate group and a 3′-terminal phosphate group (e.g., a 2′,3′-cyclic phosphate). In another embodiment, the single stranded siNA molecule of the invention comprises about 19 to about 29 (e.g., about 19, 20, 21, 22, 23, 24, 25, 26, 27, 28, or 29) nucleotides. In yet another embodiment, the single stranded siNA molecule of the invention comprises one or more chemically modified nucleotides or non-nucleotides described herein. For example, all the positions within the siNA molecule can include chemically-modified nucleotides such as nucleotides having any of Formulae I-VII, or any combination thereof to the extent that the ability of the siNA molecule to support RNAi activity in a cell is maintained.

[0149] In one embodiment, the single stranded siNA molecule having complementarity to a target nucleic acid sequence comprises one or more 2′-deoxy-2′-fluoro pyrimidine nucleotides (e.g., wherein all pyrimidine nucleotides are 2′-deoxy-2′-fluoro pyrimidine nucleotides or alternately a plurality of pyrimidine nucleotides are 2′-deoxy-2′-fluoro pyrimidine nucleotides), and one or more 2′-O-methyl purine nucleotides (e.g., wherein all purine nucleotides are 2′-O-methyl purine nucleotides or alternately a plurality of purine nucleotides are 2′-O-methyl purine nucleotides). In another embodiment, the single stranded siNA molecule comprises one or more 2′-deoxy-2′-fluoro pyrimidine nucleotides (e.g., wherein all pyrimidine nucleotides are 2′-deoxy-2′-fluoro pyrimidine nucleotides or alternately a plurality of pyrimidine nucleotides are 2′-deoxy-2′-fluoro pyrimidine nucleotides), and one or more 2′-deoxy purine nucleotides (e.g., wherein all purine nucleotides are 2′-deoxy purine nucleotides or alternately a plurality of purine nucleotides are 2′-deoxy purine nucleotides). In another embodiment, the single stranded siNA molecule comprises one or more 2′-deoxy-2′-fluoro pyrimidine nucleotides (e.g., wherein all pyrimidine nucleotides are 2′-deoxy-2′-fluoro pyrimidine nucleotides or alternately a plurality of pyrimidine nucleotides are 2′-deoxy-2′-fluoro pyrimidine nucleotides), wherein any purine nucleotides present in the antisense region are locked nucleic acid (LNA) nucleotides (e.g., wherein all purine nucleotides are LNA nucleotides or alternately a plurality of purine nucleotides are LNA nucleotides). In another embodiment, the single stranded siNA molecule comprises one or more 2′-deoxy-2′-fluoro pyrimidine nucleotides (e.g., wherein all pyrimidine nucleotides are 2′-deoxy-2′-fluoro pyrimidine nucleotides or alternately a plurality of pyrimidine nucleotides are 2′-deoxy-2′-fluoro pyrimidine nucleotides), and one or more 2′-methoxyethyl purine nucleotides (e.g., wherein all purine nucleotides are 2′-methoxyethyl purine nucleotides or alternately a plurality of purine nucleotides are 2′-methoxyethyl purine nucleotides), the single stranded siNA can comprise a terminal cap modification, such as any modification described herein or shown in FIG. 22, that is optionally present at the 3′-end, the 5′-end, or both of the 3′ and 5′-ends of the antisense sequence. The single stranded siNA optionally further comprises about 1 to about 4 (e.g., about 1, 2, 3, or 4) terminal 2′-deoxynucleotides at the 3′-end of the siNA molecule, wherein the terminal nucleotides can further comprise one or more (e.g., 1, 2, 3, or 4) phosphorothioate internucleotide linkages. The single stranded siNA optionally further comprises a terminal phosphate group, such as a 5′-terminal phosphate group.

[0150] In one embodiment, a siNA molecule of the invention is a single stranded siNA molecule that mediates RNAi activity in a cell or reconstituted in vitro system, wherein the siNA molecule comprises a single stranded polynucleotide having complementarity to a target nucleic acid sequence, and wherein one or more pyrimidine nucleotides present in the siNA are 2′-deoxy-2′-fluoro pyrimidine nucleotides (e.g., wherein all pyrimidine nucleotides are 2′-deoxy-2′-fluoro pyrimidine nucleotides or alternately a plurality of pyrimidine nucleotides are 2′-deoxy-2′-fluoro pyrimidine nucleotides), and wherein any purine nucleotides present in the antisense region are 2′-O-methyl purine nucleotides (e.g., wherein all purine nucleotides are 2′-O-methyl purine nucleotides or alternately a plurality of purine nucleotides are 2′-O-methyl purine nucleotides), and a terminal cap modification, such as any modification described herein or shown in FIG. 22, that is optionally present at the 3′-end, the 5′-end, or both of the 3′ and 5′-ends of the antisense sequence. The siNA optionally further comprises about 1 to about 4 or more (e.g., about 1, 2, 3, 4 or more) terminal 2′-deoxynucleotides at the 3′-end of the siNA molecule, wherein the terminal nucleotides can further comprise one or more (e.g., 1, 2, 3, 4 or more) phosphorothioate, phosphonoacetate, and/or thiophosphonoacetate internucleotide linkages, and wherein the siNA optionally further comprises a terminal phosphate group, such as a 5′-terminal phosphate group. In any of these embodiments, any purine nucleotides present in the antisense region are alternatively 2′-deoxy purine nucleotides (e.g., wherein all purine nucleotides are 2′-deoxy purine nucleotides or alternately a plurality of purine nucleotides are 2′-deoxy purine nucleotides). Also, in any of these embodiments, any purine nucleotides present in the siNA (i.e., purine nucleotides present in the sense and/or antisense region) can alternatively be locked nucleic acid (LNA) nucleotides (e.g., wherein all purine nucleotides are LNA nucleotides or alternately a plurality of purine nucleotides are LNA nucleotides). Also, in any of these embodiments, any purine nucleotides present in the siNA are alternatively 2′-methoxyethyl purine nucleotides (e.g., wherein all purine nucleotides are 2′-methoxyethyl purine nucleotides or alternately a plurality of purine nucleotides are 2′-methoxyethyl purine nucleotides). In another embodiment, any modified nucleotides present in the single stranded siNA molecules of the invention comprise modified nucleotides having properties or characteristics similar to naturally occurring ribonucleotides. For example, the invention features siNA molecules including modified nucleotides having a Northern conformation (e.g., Northern pseudorotation cycle, see for example Saenger, Principles of Nucleic Acid Structure, Springer-Verlag ed., 1984). As such, chemically modified nucleotides present in the single stranded siNA molecules of the invention are preferably resistant to nuclease degradation while at the same time maintaining the capacity to mediate RNAi

[0151] In one embodiment, a siNA molecule of the invention is a single stranded siNA molecule that mediates RNAi activity in a cell or reconstituted in vitro system, wherein the siNA molecule comprises a single stranded polynucleotide having complementarity to a target nucleic acid sequence, and wherein one or more pyrimidine nucleotides present in the siNA are 2′-deoxy-2′-fluoro pyrimidine nucleotides (e.g., wherein all pyrimidine nucleotides are 2′-deoxy-2′-fluoro pyrimidine nucleotides or alternately a plurality of pyrimidine nucleotides are 2′-deoxy-2′-fluoro pyrimidine nucleotides), and wherein any purine nucleotides present in the siNA are 2′-O-methyl purine nucleotides (e.g., wherein all purine nucleotides are 2′-O-methyl purine nucleotides or alternately a plurality of purine nucleotides are 2′-O-methyl purine nucleotides), and a terminal cap modification, such as any modification described herein or shown in FIG. 22, that is optionally present at the 3′-end, the 5′-end, or both of the 3′ and 5′-ends of the antisense sequence, the siNA optionally further comprising about 1 to about 4 (e.g., about 1, 2, 3, or 4) terminal 2′-deoxynucleotides at the 3′-end of the siNA molecule, wherein the terminal nucleotides can further comprise one or more (e.g., 1, 2, 3, or 4) phosphorothioate internucleotide linkages, and wherein the siNA optionally further comprises a terminal phosphate group, such as a 5′-terminal phosphate group.

[0152] In one embodiment, a siNA molecule of the invention is a single stranded siNA molecule that mediates RNAi activity in a cell or reconstituted in vitro system, wherein the siNA molecule comprises a single stranded polynucleotide having complementarity to a target nucleic acid sequence, and wherein one or more pyrimidine nucleotides present in the siNA are 2′-deoxy-2′-fluoro pyrimidine nucleotides (e.g., wherein all pyrimidine nucleotides are 2′-deoxy-2′-fluoro pyrimidine nucleotides or alternately a plurality of pyrimidine nucleotides are 2′-deoxy-2′-fluoro pyrimidine nucleotides), and wherein any purine nucleotides present in the siNA are 2′-deoxy purine nucleotides (e.g., wherein all purine nucleotides are 2′-deoxy purine nucleotides or alternately a plurality of purine nucleotides are 2′-deoxy purine nucleotides), and a terminal cap modification, such as any modification described herein or shown in FIG. 22, that is optionally present at the 3′-end, the 5′-end, or both of the 3′ and 5′-ends of the antisense sequence, the siNA optionally further comprising about 1 to about 4 (e.g., about 1, 2, 3, or 4) terminal 2′-deoxynucleotides at the 3′-end of the siNA molecule, wherein the terminal nucleotides can further comprise one or more (e.g., 1, 2, 3, or 4) phosphorothioate internucleotide linkages, and wherein the siNA optionally further comprises a terminal phosphate group, such as a 5′-terminal phosphate group.

[0153] In one embodiment, a siNA molecule of the invention is a single stranded siNA molecule that mediates RNAi activity in a cell or reconstituted in vitro system, wherein the siNA molecule comprises a single stranded polynucleotide having complementarity to a target nucleic acid sequence, and wherein one or more pyrimidine nucleotides present in the siNA are 2′-deoxy-2′-fluoro pyrimidine nucleotides (e.g., wherein all pyrimidine nucleotides are 2′-deoxy-2′-fluoro pyrimidine nucleotides or alternately a plurality of pyrimidine nucleotides are 2′-deoxy-2′-fluoro pyrimidine nucleotides), and wherein any purine nucleotides present in the siNA are locked nucleic acid (LNA) nucleotides (e.g., wherein all purine nucleotides are LNA nucleotides or alternately a plurality of purine nucleotides are LNA nucleotides), and a terminal cap modification, such as any modification described herein or shown in FIG. 22, that is optionally present at the 3′-end, the 5′-end, or both of the 3′ and 5′-ends of the antisense sequence, the siNA optionally further comprising about 1 to about 4 (e.g., about 1, 2, 3, or 4) terminal 2′-deoxynucleotides at the 3′-end of the siNA molecule, wherein the terminal nucleotides can further comprise one or more (e.g., 1, 2, 3, or 4) phosphorothioate internucleotide linkages, and wherein the siNA optionally further comprises a terminal phosphate group, such as a 5′-terminal phosphate group.

[0154] In one embodiment, a siNA molecule of the invention is a single stranded siNA molecule that mediates RNAi activity in a cell or reconstituted in vitro system, wherein the siNA molecule comprises a single stranded polynucleotide having complementarity to a target nucleic acid sequence, and wherein one or more pyrimidine nucleotides present in the siNA are 2′-deoxy-2′-fluoro pyrimidine nucleotides (e.g., wherein all pyrimidine nucleotides are 2′-deoxy-2′-fluoro pyrimidine nucleotides or alternately a plurality of pyrimidine nucleotides are 2′-deoxy-2′-fluoro pyrimidine nucleotides), and wherein any purine nucleotides present in the siNA are 2′-methoxyethyl purine nucleotides (e.g., wherein all purine nucleotides are 2′-methoxyethyl purine nucleotides or alternately a plurality of purine nucleotides are 2′-methoxyethyl purine nucleotides), and a terminal cap modification, such as any modification described herein or shown in FIG. 22, that is optionally present at the 3′-end, the 5′-end, or both of the 3′ and 5′-ends of the antisense sequence, the siNA optionally further comprising about 1 to about 4 (e.g., about 1, 2, 3, or 4) terminal 2′-deoxynucleotides at the 3′-end of the siNA molecule, wherein the terminal nucleotides can further comprise one or more (e.g., 1, 2, 3, or 4) phosphorothioate internucleotide linkages, and wherein the siNA optionally further comprises a terminal phosphate group, such as a 5′-terminal phosphate group.

[0155] In another embodiment, any modified nucleotides present in the single stranded siNA molecules of the invention comprise modified nucleotides having properties or characteristics similar to naturally occurring ribonucleotides. For example, the invention features siNA molecules including modified nucleotides having a Northern conformation (e.g., Northern pseudorotation cycle, see for example Saenger, Principles of Nucleic Acid Structure, Springer-Verlag ed., 1984). As such, chemically modified nucleotides present in the single stranded siNA molecules of the invention are preferably resistant to nuclease degradation while at the same time maintaining the capacity to mediate RNAi.

[0156] In one embodiment, the invention features a method for modulating the expression of a gene within a cell comprising: (a) synthesizing a siNA molecule of the invention, which can be chemically-modified, wherein one of the siNA strands comprises a sequence complementary to RNA of the gene; and (b) introducing the siNA molecule into a cell under conditions suitable to modulate the expression of the gene in the cell.

[0157] In one embodiment, the invention features a method for modulating the expression of a gene within a cell comprising: (a) synthesizing a siNA molecule of the invention, which can be chemically-modified, wherein one of the siNA strands comprises a sequence complementary to RNA of the gene and wherein the sense strand sequence of the siNA comprises a sequence substantially similar to the sequence of the target RNA; and (b) introducing the siNA molecule into a cell under conditions suitable to modulate the expression of the gene in the cell.

[0158] In another embodiment, the invention features a method for modulating the expression of more than one gene within a cell comprising: (a) synthesizing siNA molecules of the invention, which can be chemically-modified, wherein one of the siNA strands comprises a sequence complementary to RNA of the genes; and (b) introducing the siNA molecules into a cell under conditions suitable to modulate the expression of the genes in the cell.

[0159] In another embodiment, the invention features a method for modulating the expression of more than one gene within a cell comprising: (a) synthesizing a siNA molecule of the invention, which can be chemically-modified, wherein one of the siNA strands comprises a sequence complementary to RNA of the gene and wherein the sense strand sequence of the siNA comprises a sequence substantially similar to the sequence of the target RNA; and (b) introducing the siNA molecules into a cell under conditions suitable to modulate the expression of the genes in the cell.

[0160] In one embodiment, siNA molecules of the invention are used as reagents in ex vivo applications. For example, siNA reagents are introduced into tissue or cells that are transplanted into a subject for therapeutic effect. The cells and/or tissue can be derived from an organism or subject that later receives the explant, or can be derived from another organism or subject prior to transplantation. The siNA molecules can be used to modulate the expression of one or more genes in the cells or tissue, such that the cells or tissue obtain a desired phenotype or are able to perform a function when transplanted in vivo. In one embodiment, certain target cells from a patient are extracted. These extracted cells are contacted with siNAs targeteing a specific nucleotide sequence within the cells under conditions suitable for uptake of the siNAs by these cells (e.g., using delivery reagents such as cationic lipids, liposomes and the like or using techniques such as electroporation to facilitate the delivery of siNAs into cells). The cells are then reintroduced back into the same patient or other patients. Non-limiting examples of ex vivo applications include use in organ/tissue transplant, tissue grafting, or treatment of pulmonary disease (e.g., restenosis) or prevent neointimal hyperplasia and atherosclerosis in vein grafts. Such ex vivo applications may also used to treat conditions associated with coronary and peripheral bypass graft failure, for example, such methods can be used in conjunction with peripheral vascular bypass graft surgery and coronary artery bypass graft surgery. Additional applications include transplants to treat CNS lesions or injury, including use in treatment of neurodegenerative conditions such as Alzheimer's disease, Parkinson's Disease, Epilepsy, Dementia, Huntington's disease, or amyotrophic lateral sclerosis (ALS).

[0161] In one embodiment, the invention features a method of modulating the expression of a gene in a tissue explant comprising: (a) synthesizing a siNA molecule of the invention, which can be chemically-modified, wherein one of the siNA strands comprises a sequence complementary to RNA of the gene; and (b) introducing the siNA molecule into a cell of the tissue explant derived from a particular organism under conditions suitable to modulate the expression of the gene in the tissue explant. In another embodiment, the method further comprises introducing the tissue explant back into the organism the tissue was derived from or into another organism under conditions suitable to modulate the expression of the gene in that organism.

[0162] In one embodiment, the invention features a method of modulating the expression of a gene in a tissue explant comprising: (a) synthesizing a siNA molecule of the invention, which can be chemically-modified, wherein one of the siNA strands comprises a sequence complementary to RNA of the gene and wherein the sense strand sequence of the siNA comprises a sequence substantially similar to the sequence of the target RNA; and (b) introducing the siNA molecule into a cell of the tissue explant derived from a particular organism under conditions suitable to modulate the expression of the gene in the tissue explant. In another embodiment, the method further comprises introducing the tissue explant back into the organism the tissue was derived from or into another organism under conditions suitable to modulate the expression of the gene in that organism.

[0163] In another embodiment, the invention features a method of modulating the expression of more than one gene in a tissue explant comprising: (a) synthesizing siNA molecules of the invention, which can be chemically-modified, wherein one of the siNA strands comprises a sequence complementary to RNA of the genes; and (b) introducing the siNA molecules into a cell of the tissue explant derived from a particular organism under conditions suitable to modulate the expression of the genes in the tissue explant. In another embodiment, the method further comprises introducing the tissue explant back into the organism the tissue was derived from or into another organism under conditions suitable to modulate the expression of the genes in that organism.

[0164] In one embodiment, the invention features a method of modulating the expression of a gene in an organism comprising: (a) synthesizing a siNA molecule of the invention, which can be chemically-modified, wherein one of the siNA strands comprises a sequence complementary to RNA of the gene; and (b) introducing the siNA molecule into the organism under conditions suitable to Modulate the expression of the gene in the organism.

[0165] In another embodiment, the invention features a method of modulating the expression of more than one gene in an organism comprising: (a) synthesizing siNA molecules of the invention, which can be chemically-modified, wherein one of the siNA strands comprises a sequence complementary to RNA of the genes; and (b) introducing the siNA molecules into the organism under conditions suitable to modulate the expression of the genes in the organism.

[0166] In one embodiment, the invention features a method for modulating the expression of a gene within a cell comprising: (a) synthesizing a siNA molecule of the invention, which can be chemically-modified, wherein the siNA comprises a single stranded sequence having complementarity to RNA of the gene; and (b) introducing the siNA molecule into a cell under conditions suitable to modulate the expression of the gene in the cell.

[0167] In one embodiment, the invention features a method of modulating the expression of a target gene in an tissue or organ comprising: (a) synthesizing a siNA molecule of the invention, which can be chemically-modified, wherein the siNA comprises a single stranded sequence having complementarity to RNA of the target gene; and (b) introducing the siNA molecule into the tissue or organ under conditions suitable to modulate the expression of the target gene in the organism. In another embodiment, the tissue is ocular tissue and the organ is the eye. In another embodiment, the tissue comprises hepatocytes and/or hepatic tissue and the organ is the liver.

[0168] In another embodiment, the invention features a method for modulating the expression of more than one gene within a cell comprising: (a) synthesizing siNA molecules of the invention, which can be chemically-modified, wherein the siNA comprises a single stranded sequence having complementarity to RNA of the gene; and (b) contacting the siNA molecule with a cell in vitro or in vivo under conditions suitable to modulate the expression of the genes in the cell.

[0169] In one embodiment, the invention features a method of modulating the expression of a gene in a tissue explant comprising: (a) synthesizing a siNA molecule of the invention, which can be chemically-modified, wherein the siNA comprises a single stranded sequence having complementarity to RNA of the gene; and (b) contacting the siNA molecule with a cell of the tissue explant derived from a particular organism under conditions suitable to modulate the expression of the gene in the tissue explant. In another embodiment, the method further comprises introducing the tissue explant back into the organism the tissue was derived from or into another organism under conditions suitable to modulate the expression of the gene in that organism.

[0170] In another embodiment, the invention features a method of modulating the expression of more than one gene in a tissue explant comprising: (a) synthesizing siNA molecules of the invention, which can be chemically-modified, wherein the siNA comprises a single stranded sequence having complementarity to RNA of the gene; and (b) introducing the siNA molecules into a cell of the tissue explant derived from a particular organism under conditions suitable to modulate the expression of the genes in the tissue explant. In another embodiment, the method further comprises introducing the tissue explant back into the organism the tissue was derived from or into another organism under conditions suitable to modulate the expression of the genes in that organism.

[0171] In one embodiment, the invention features a method of modulating the expression of a gene in an organism comprising: (a) synthesizing a siNA molecule of the invention, which can be chemically-modified, wherein the siNA comprises a single stranded sequence having complementarity to RNA of the gene; and (b) introducing the siNA molecule into the organism under conditions suitable to modulate the expression of the gene in the organism.

[0172] In another embodiment, the invention features a method of modulating the expression of more than one gene in an organism comprising: (a) synthesizing siNA molecules of the invention, which can be chemically-modified, wherein the siNA comprises a single stranded sequence having complementarity to RNA of the gene; and (b) introducing the siNA molecules into the organism under conditions suitable to modulate the expression of the genes in the organism.

[0173] In one embodiment, the invention features a method of modulating the expression of a gene in an organism comprising contacting the organism with a siNA molecule of the invention under conditions suitable to modulate the expression of the gene in the organism.

[0174] In another embodiment, the invention features a method of modulating the expression of more than one gene in an organism comprising contacting the organism with one or more siNA molecules of the invention under conditions suitable to modulate the expression of the genes in the organism.

[0175] The siNA molecules of the invention can be designed to down regulate or inhibit target gene expression through RNAi targeting of a variety of RNA molecules. In one embodiment, the siNA molecules of the invention are used to target various RNAs corresponding to a target gene. Non-limiting examples of such RNAs include messenger RNA (mRNA), alternate RNA splice variants of target gene(s), post-transcriptionally modified RNA of target gene(s), pre-mRNA of target gene(s), and/or RNA templates. If alternate splicing produces a family of transcripts that are distinguished by usage of appropriate exons, the instant invention can be used to inhibit gene expression through the appropriate exons to specifically inhibit or to distinguish among the functions of gene family members. For example, a protein that contains an alternatively spliced transmembrane domain can be expressed in both membrane bound and secreted forms. Use of the invention to target the exon containing the transmembrane domain can be used to determine the functional consequences of pharmaceutical targeting of membrane bound as opposed to the secreted form of the protein. Non-limiting examples of applications of the invention relating to targeting these RNA molecules include therapeutic pharmaceutical applications, pharmaceutical discovery applications, molecular diagnostic and gene function applications, and gene mapping, for example using single nucleotide polymorphism mapping with siNA molecules of the invention. Such applications can be implemented using known gene sequences or from partial sequences available from an expressed sequence tag (EST).

[0176] In another embodiment, the siNA molecules of the invention are used to target conserved sequences corresponding to a gene family or gene families. As such, siNA molecules targeting multiple gene targets can provide increased therapeutic effect. In addition, siNA can be used to characterize pathways of gene function in a variety of applications. For example, the present invention can be used to inhibit the activity of target gene(s) in a pathway to determine the function of uncharacterized gene(s) in gene function analysis, mRNA function analysis, or translational analysis. The invention can be used to determine potential target gene pathways involved in various diseases and conditions toward pharmaceutical development. The invention can be used to understand pathways of gene expression involved in, for example, in development, such as prenatal development and postnatal development, and/or the progression and/or maintenance of cancer, infectious disease, autoimmunity, inflammation, endocrine disorders, renal disease, pulmonary disease, cardiovascular disease, birth defects, ageing, hair growth, any other disease, condition, trait, genotype or phenotype related to gene expression.

[0177] In one embodiment, siNA molecule(s) and/or methods of the invention are used to down-regulate or inhibit the expression of gene(s) that encode RNA referred to by Genbank Accession, for example genes encoding RNA sequence(s) referred to herein by Genbank Accession number.

[0178] In one embodiment, the invention features a method comprising: (a) generating a library of siNA constructs having a predetermined complexity; and (b) assaying the siNA constructs of (a) above, under conditions suitable to determine RNAi target sites within the target RNA sequence. In one embodiment, the siNA molecules of (a) have strands of a fixed length, for example, about 23 nucleotides in length. In another embodiment, the siNA molecules of (a) are of differing length, for example having strands of about 19 to about 25 (e.g., about 19, 20, 21, 22, 23, 24, or 25) nucleotides in length. In one embodiment, the assay can comprise a reconstituted in vitro siNA assay as described herein. In another embodiment, the assay can comprise a cell culture system in which target RNA is expressed. In another embodiment, fragments of target RNA are analyzed for detectable levels of cleavage, for example by gel electrophoresis, northern blot analysis, or RNAse protection assays, to determine the most suitable target site(s) within the target RNA sequence. The target RNA sequence can be obtained as is known in the art, for example, by cloning and/or transcription for in vitro systems, and by cellular expression in in vivo systems.

[0179] In one embodiment, the invention features a method comprising: (a) generating a randomized library of siNA constructs having a predetermined complexity, such as of 4^{N}, where N represents the number of base paired nucleotides in each of the siNA construct strands (eg. for a siNA construct having 21 nucleotide sense and antisense strands with 19 base pairs, the complexity would be 4¹⁹); and (b) assaying the siNA constructs of (a) above, under conditions suitable to determine RNAi target sites within the target RNA sequence. In another embodiment, the siNA molecules of (a) have strands of a fixed length, for example about 23 nucleotides in length. In yet another embodiment, the siNA molecules of (a) are of differing length, for example having strands of about 19 to about 25 (e.g., about 19, 20, 21, 22, 23, 24, or 25) nucleotides in length. In one embodiment, the assay can comprise a reconstituted in vitro siNA assay as described in Example 7 herein. In another embodiment, the assay can comprise a cell culture system in which target RNA is expressed. In another embodiment, fragments of target RNA are analyzed for detectable levels of cleavage, for example by gel electrophoresis, northern blot analysis, or RNAse protection assays, to determine the most suitable target site(s) within the target RNA sequence. In another embodiment, the target RNA sequence can be obtained as is known in the art, for example, by cloning and/or transcription for in vitro systems, and by cellular expression in in vivo systems.

[0180] In another embodiment, the invention features a method comprising: (a) analyzing the sequence of a RNA target encoded by a target gene; (b) synthesizing one or more sets of siNA molecules having sequence complementary to one or more regions of the RNA of (a); and (c) assaying the siNA molecules of (b) under conditions suitable to determine RNAi targets within the target RNA sequence. In one embodiment, the siNA molecules of (b) have strands of a fixed length, for example about 23 nucleotides in length. In another embodiment, the siNA molecules of (b) are of differing length, for example having strands of about 19 to about 25 (e.g., about 19, 20, 21, 22, 23, 24, or 25) nucleotides in length. In one embodiment, the assay can comprise a reconstituted in vitro siNA assay as described herein. In another embodiment, the assay can comprise a cell culture system in which target RNA is expressed. Fragments of target RNA are analyzed for detectable levels of cleavage, for example by gel electrophoresis, northern blot analysis, or RNAse protection assays, to determine the most suitable target site(s) within the target RNA sequence. The target RNA sequence can be obtained as is known in the art, for example, by cloning and/or transcription for in vitro systems, and by expression in in vivo systems.

[0181] By “target site” is meant a sequence within a target RNA that is “targeted” for cleavage mediated by a siNA construct which contains sequences within its antisense region that are complementary to the target sequence.

[0182] By “detectable level of cleavage” is meant cleavage of target RNA (and formation of cleaved product RNAs) to an extent sufficient to discern cleavage products above the background of RNAs produced by random degradation of the target RNA. Production of cleavage products from 1-5% of the target RNA is sufficient to detect above the background for most methods of detection.

[0183] In one embodiment, the invention features a composition comprising a siNA molecule of the invention, which can be chemically-modified, in a pharmaceutically acceptable carrier or diluent. In another embodiment, the invention features a pharmaceutical composition comprising siNA molecules of the invention, which can be chemically-modified, targeting one or more genes in a pharmaceutically acceptable carrier or diluent. In another embodiment, the invention features a method for diagnosing a disease, condition, trait, genotype or phenotype in a subject comprising administering to the subject a composition of the invention under conditions suitable for the diagnosis of the disease, condition, trait, genotype or phenotype in the subject.

[0184] In one embodiment, the invention features a method for treating or preventing a disease, condition, trait, genotype or phenotype in a subject, comprising administering to the subject a composition of the invention under conditions suitable for the treatment or prevention of the disease, condition, trait, genotype or phenotype in the subject, alone or in conjunction with one or more other therapeutic compounds. In yet another embodiment, the invention features a method for reducing or preventing tissue rejection in a subject comprising administering to the subject a composition of the invention under conditions suitable for the reduction or prevention of tissue rejection in the subject.

[0185] In one embodiment, the invention features a method for alleviating the symptoms of a disease, condition, trait, genotype or phenotype in a subject, comprising administering to the subject a composition of the invention (alone or in combination (simultanesouly or sequentially) with one or more other therapeutic compounds) under conditions suitable for alleviating the symptoms of the disease, condition, trait, genotype or phenotype in the subject.

[0186] In another embodiment, the invention features a method for validating a gene target, comprising: (a) synthesizing a siNA molecule of the invention, which can be chemically-modified, wherein one of the siNA strands includes a sequence complementary to RNA of a target gene; (b) introducing the siNA molecule into a cell, tissue, or organism under conditions suitable for modulating expression of the target gene in the cell, tissue, or organism; and (c) determining the function of the gene by assaying for any phenotypic change in the cell, tissue, or organism.

[0187] In another embodiment, the invention features a method for validating a target gene comprising: (a) synthesizing a siNA molecule of the invention, which can be chemically-modified, wherein one of the siNA strands includes a sequence complementary to RNA of a target gene; (b) introducing the siNA molecule into a biological system under conditions suitable for modulating expression of the target gene in the biological system; and (c) determining the function of the gene by assaying for any phenotypic change in the biological system.

[0188] By “biological system” is meant, material, in a purified or unpurified form, from biological sources, including but not limited to human, animal, plant, insect, bacterial, viral or other sources, wherein the system comprises the components required for RNAi activity. The term “biological system” includes, for example, a cell, tissue, or organism, or extract thereof. The term biological system also includes reconstituted RNAi systems that can be used in an in vitro setting.

[0189] By “phenotypic change” is meant any detectable change to a cell that occurs in response to contact or treatment with a nucleic acid molecule of the invention (e.g., siNA). Such detectable changes include, but are not limited to, changes in shape, size, proliferation, motility, protein expression or RNA expression or other physical or chemical changes as can be assayed by methods known in the art. The detectable change can also include expression of reporter genes/molecules such as Green Florescent Protein (GFP) or various tags that are used to identify an expressed protein or any other cellular component that can be assayed.

[0190] In one embodiment, the invention features a kit containing a siNA molecule of the invention, which can be chemically-modified, that can be used to modulate the expression of a target gene in biological system, including, for example, in a cell, tissue, or organism. In another embodiment, the invention features a kit containing more than one siNA molecule of the invention, which can be chemically-modified, that can be used to modulate the expression of more than one target gene in a biological system, including, for example, in a cell, tissue, or organism.

[0191] In one embodiment, the invention features a kit containing a siNA molecule of the invention, which can be chemically-modified, that can be used to modulate the expression of a target gene in a biological system. In another embodiment, the invention features a kit containing more than one siNA molecule of the invention, which can be chemically-modified, that can be used to modulate the expression of more than one target gene in a biological system.

[0192] In one embodiment, the invention features a cell containing one or more siNA molecules of the invention, which can be chemically-modified. In another embodiment, the cell containing a siNA molecule of the invention is a mammalian cell. In yet another embodiment, the cell containing a siNA molecule of the invention is a human cell.

[0193] In one embodiment, the synthesis of a siNA molecule of the invention, which can be chemically-modified, comprises: (a) synthesis of two complementary strands of the siNA molecule; (b) annealing the two complementary strands together under conditions suitable to obtain a double-stranded siNA molecule. In another embodiment, synthesis of the two complementary strands of the siNA molecule is by solid phase oligonucleotide synthesis. In yet another embodiment, synthesis of the two complementary strands of the siNA molecule is by solid phase tandem oligonucleotide synthesis.

[0194] In one embodiment, the invention features a method for synthesizing a siNA duplex molecule comprising: (a) synthesizing a first oligonucleotide sequence strand of the siNA molecule, wherein the first oligonucleotide sequence strand comprises a cleavable linker molecule that can be used as a scaffold for the synthesis of the second oligonucleotide sequence strand of the siNA; (b) synthesizing the second oligonucleotide sequence strand of siNA on the scaffold of the first oligonucleotide sequence strand, wherein the second oligonucleotide sequence strand further comprises a chemical moiety than can be used to purify the siNA duplex; (c) cleaving the linker molecule of (a) under conditions suitable for the two siNA oligonucleotide strands to hybridize and form a stable duplex; and (d) purifying the siNA duplex utilizing the chemical moiety of the second oligonucleotide sequence strand. In one embodiment, cleavage of the linker molecule in (c) above takes place during deprotection of the oligonucleotide, for example, under hydrolysis conditions using an alkylamine base such as methylamine. In one embodiment, the method of synthesis comprises solid phase synthesis on a solid support such as controlled pore glass (CPG) or polystyrene, wherein the first sequence of (a) is synthesized on a cleavable linker, such as a succinyl linker, using the solid support as a scaffold. The cleavable linker in (a) used as a scaffold for synthesizing the second strand can comprise similar reactivity as the solid support derivatized linker, such that cleavage of the solid support derivatized linker and the cleavable linker of (a) takes place concomitantly. In another embodiment, the chemical moiety of (b) that can be used to isolate the attached oligonucleotide sequence comprises a trityl group, for example a dimethoxytrityl group, which can be employed in a trityl-on synthesis strategy as described herein. In yet another embodiment, the chemical moiety, such as a dimethoxytrityl group, is removed during purification, for example, using acidic conditions.

[0195] In a further embodiment, the method for siNA synthesis is a solution phase synthesis or hybrid phase synthesis wherein both strands of the siNA duplex are synthesized in tandem using a cleavable linker attached to the first sequence which acts a scaffold for synthesis of the second sequence. Cleavage of the linker under conditions suitable for hybridization of the separate siNA sequence strands results in formation of the double-stranded siNA molecule.

[0196] In another embodiment, the invention features a method for synthesizing a siNA duplex molecule comprising: (a) synthesizing one oligonucleotide sequence strand of the siNA molecule, wherein the sequence comprises a cleavable linker molecule that can be used as a scaffold for the synthesis of another oligonucleotide sequence; (b) synthesizing a second oligonucleotide sequence having complementarity to the first sequence strand on the scaffold of (a), wherein the second sequence comprises the other strand of the double-stranded siNA molecule and wherein the second sequence further comprises a chemical moiety than can be used to isolate the attached oligonucleotide sequence; (c) purifying the product of (b) utilizing the chemical moiety of the second oligonucleotide sequence strand under conditions suitable for isolating the full-length sequence comprising both siNA oligonucleotide strands connected by the cleavable linker and under conditions suitable for the two siNA oligonucleotide strands to hybridize and form a stable duplex. In one embodiment, cleavage of the linker molecule in (c) above takes place during deprotection of the oligonucleotide, for example under hydrolysis conditions. In another embodiment, cleavage of the linker molecule in (c) above takes place after deprotection of the oligonucleotide. In another embodiment, the method of synthesis comprises solid phase synthesis on a solid support such as controlled pore glass (CPG) or polystyrene, wherein the first sequence of (a) is synthesized on a cleavable linker, such as a succinyl linker, using the solid support as a scaffold. The cleavable linker in (a) used as a scaffold for synthesizing the second strand can comprise similar reactivity or differing reactivity as the solid support derivatized linker, such that cleavage of the solid support derivatized linker and the cleavable linker of (a) takes place either concomitantly or sequentially. In one embodiment, the chemical moiety of (b) that can be used to isolate the attached oligonucleotide sequence comprises a trityl group, for example a dimethoxytrityl group.

[0197] In another embodiment, the invention features a method for making a double-stranded siNA molecule in a single synthetic process comprising: (a) synthesizing an oligonucleotide having a first and a second sequence, wherein the first sequence is complementary to the second sequence, and the first oligonucleotide sequence is linked to the second sequence via a cleavable linker, and wherein a terminal 5′-protecting group, for example, a 5′-O-dimethoxytrityl group (5′-O-DMT) remains on the oligonucleotide having the second sequence; (b) deprotecting the oligonucleotide whereby the deprotection results in the cleavage of the linker joining the two oligonucleotide sequences; and (c) purifying the product of (b) under conditions suitable for isolating the double-stranded siNA molecule, for example using a trityl-on synthesis strategy as described herein.

[0198] In another embodiment, the method of synthesis of siNA molecules of the invention comprises the teachings of Scaringe et al., U.S. Pat. Nos. 5,889,136; 6,008,400; and 6,111,086, incorporated by reference herein in their entirety.

[0199] In one embodiment, the invention features siNA constructs that mediate RNAi in a cell or reconstituted system, wherein the siNA construct comprises one or more chemical modifications, for example, one or more chemical modifications having any of Formulae I-VII or any combination thereof that increases the nuclease resistance of the siNA construct.

[0200] In another embodiment, the invention features a method for generating siNA molecules with increased nuclease resistance comprising (a) introducing nucleotides having any of Formula I-VII or any combination thereof into a siNA molecule, and (b) assaying the siNA molecule of step (a) under conditions suitable for isolating siNA molecules having increased nuclease resistance.

[0201] In one embodiment, the invention features siNA constructs that mediate RNAi against a target gene, wherein the siNA construct comprises one or more chemical modifications described herein that modulates the binding affinity between the sense and antisense strands of the siNA construct.

[0202] In one embodiment, the binding affinity between the sense and antisense strands of the siNA construct is modulated to increase the activity of the siNA molecule with regard to the ability of the siNA to mediate RNA interference. In another embodiment the binding affinity between the sense and antisense strands of the siNA construct is decreased. The binding affinity between the sense and antisense strands of the siNA construct can be decreased by introducing one or more chemically modified nucleotides in the siNA sequence that disrupts the duplex stability of the siNA (e.g., lowers the Tm of the duplex). The binding affinity between the sense and antisense strands of the siNA construct can be decreased by introducing one of more nucleotides in the siNA sequence that do not form Watson-Crick base pairs. The binding affinity between the sense and antisense strands of the siNA construct can be decreased by introducing one or more wobble base pairs in the siNA sequence. The binding affinity between the sense and antisense strands of the siNA construct can be decreased by modifying the nucleobase composition of the siNA, such as by altering the G-C content of the siNA sequence (e.g., decreasing the number of G-C base pairs in the siNA sequence). These modifications and alterations in sequence can be introduced selectively at pre-determined positions of the siNA sequence to increase siNA mediated RNAi activity. For example, such modificaitons and sequence alterations can be introduced to disrupt siNA duplex stability between the 5′-end of the antisense strand and the 3′-end of the sense strand, the 3′-end of the antisense strand and the 5′ -end of the sense strand, or alternately the middle of the siNA duplex. In another embodiment, siNA molecules are screened for optimized RNAi activity by introducing such modifications and sequence alterations either by rational design based upon observed rules or trends in increasing siNA activity, or randomly via combinatorial selection processes that cover either partial or complete sequence space of the siNA construct.

[0203] In another embodiment, the invention features a method for generating siNA molecules with increased binding affinity between the sense and antisense strands of the siNA molecule comprising (a) introducing nucleotides having any of Formula I-VII or any combination thereof into a siNA molecule, and (b) assaying the siNA molecule of step (a) under conditions suitable for isolating siNA molecules having increased binding affinity between the sense and antisense strands of the siNA molecule.

[0204] In another embodiment, the invention features a method for generating siNA molecules with decreased binding affinity between the sense and antisense strands of the siNA molecule comprising (a) introducing nucleotides having any of Formula I-VII or any combination thereof into a siNA molecule, and (b) assaying the siNA molecule of step (a) under conditions suitable for isolating siNA molecules having decreased binding affinity between the sense and antisense strands of the siNA molecule.

[0205] In one embodiment, the invention features siNA constructs that mediate RNAi in a cell or reconstituted system, wherein the siNA construct comprises one or more chemical modifications described herein that modulates the binding affinity between the antisense strand of the siNA construct and a complementary target RNA sequence within a cell.

[0206] In one embodiment, the invention features siNA constructs that mediate RNAi in a cell or reconstituted system, wherein the siNA construct comprises one or more chemical modifications described herein that modulates the binding affinity between the antisense strand of the siNA construct and a complementary target DNA sequence within a cell.

[0207] In another embodiment, the invention features a method for generating siNA molecules with increased binding affinity between the antisense strand of the siNA molecule and a complementary target RNA sequence comprising (a) introducing nucleotides having any of Formula I-VII or any combination thereof into a siNA molecule, and (b) assaying the siNA molecule of step (a) under conditions suitable for isolating siNA molecules having increased binding affinity between the antisense strand of the siNA molecule and a complementary target RNA sequence.

[0208] In another embodiment, the invention features a method for generating siNA molecules with increased binding affinity between the antisense strand of the siNA molecule and a complementary target DNA sequence comprising (a) introducing nucleotides having any of Formula I-VII or any combination thereof into a siNA molecule, and (b) assaying the siNA molecule of step (a) under conditions suitable for isolating siNA molecules having increased binding affinity between the antisense strand of the siNA molecule and a complementary target DNA sequence.

[0209] In another embodiment, the invention features a method for generating siNA molecules with decreased binding affinity between the antisense strand of the siNA molecule and a complementary target RNA sequence comprising (a) introducing nucleotides having any of Formula I-VII or any combination thereof into a siNA molecule, and (b) assaying the siNA molecule of step (a) under conditions suitable for isolating siNA molecules having decreased binding affinity between the antisense strand of the siNA molecule and a complementary target RNA sequence.

[0210] In another embodiment, the invention features a method for generating siNA molecules with decreased binding affinity between the antisense strand of the siNA molecule and a complementary target DNA sequence comprising (a) introducing nucleotides having any of Formula I-VII or any combination thereof into a siNA molecule, and (b) assaying the siNA molecule of step (a) under conditions suitable for isolating siNA molecules having decreased binding affinity between the antisense strand of the siNA molecule and a complementary target DNA sequence.

[0211] In one embodiment, the invention features siNA constructs that mediate RNAi in a cell or reconstituted system, wherein the siNA construct comprises one or more chemical modifications described herein that modulate the polymerase activity of a cellular polymerase capable of generating additional endogenous siNA molecules having sequence homology to the chemically-modified siNA construct.

[0212] In another embodiment, the invention features a method for generating siNA molecules capable of mediating increased polymerase activity of a cellular polymerase capable of generating additional endogenous siNA molecules having sequence homology to a chemically-modified siNA molecule comprising (a) introducing nucleotides having any of Formula I-VII or any combination thereof into a siNA molecule, and (b) assaying the siNA molecule of step (a) under conditions suitable for isolating siNA molecules capable of mediating increased polymerase activity of a cellular polymerase capable of generating additional endogenous siNA molecules having sequence homology to the chemically-modified siNA molecule. In one embodiment, the invention features chemically-modified siNA constructs that mediate RNAi in a cell or reconstituted system, wherein the chemical modifications do not significantly effect the interaction of siNA with a target RNA molecule, DNA molecule and/or proteins or other factors that are essential for RNAi in a manner that would decrease the efficacy of RNAi mediated by such siNA constructs.

[0213] In another embodiment, the invention features a method for generating siNA molecules with improved RNAi activity comprising (a) introducing nucleotides having any of Formula I-VII or any combination thereof into a siNA molecule, and (b) assaying the siNA molecule of step (a) under conditions suitable for isolating siNA molecules having improved RNAi activity.

[0214] In yet another embodiment, the invention features a method for generating siNA molecules with improved RNAi activity against a target RNA comprising (a) introducing nucleotides having any of Formula I-VII or any combination thereof into a siNA molecule, and (b) assaying the siNA molecule of step (a) under conditions suitable for isolating siNA molecules having improved RNAi activity against the target RNA.

[0215] In yet another embodiment, the invention features a method for generating siNA molecules with improved RNAi activity against a DNA target comprising (a) introducing nucleotides having any of Formula I-VII or any combination thereof into a siNA molecule, and (b) assaying the siNA molecule of step (a) under conditions suitable for isolating siNA molecules having improved RNAi activity against the DNA target, such as a gene, chromosome, or portion thereof.

[0216] In one embodiment, the invention features siNA constructs that mediate RNAi in a cell or reconstituted system, wherein the siNA construct comprises one or more chemical modifications described herein that modulates the cellular uptake of the siNA construct.

[0217] In another embodiment, the invention features a method for generating siNA molecules against a target gene with improved cellular uptake comprising (a) introducing nucleotides having any of Formula I-VII or any combination thereof into a siNA molecule, and (b) assaying the siNA molecule of step (a) under conditions suitable for isolating siNA molecules having improved cellular uptake.

[0218] In one embodiment, the invention features siNA constructs that mediate RNAi against a target gene, wherein the siNA construct comprises one or more chemical modifications described herein that increases the bioavailability of the siNA construct, for example, by attaching polymeric conjugates such as polyethyleneglycol or equivalent conjugates that improve the pharmacokinetics of the siNA construct, or by attaching conjugates that target specific tissue types or cell types in vivo. Non-limiting examples of such conjugates are described in Vargeese et al., U.S. Ser. No. 10/201,394 incorporated by reference herein.

[0219] In one embodiment, the invention features a method for generating siNA molecules of the invention with improved bioavailability comprising (a) introducing a conjugate into the structure of a siNA molecule, and (b) assaying the siNA molecule of step (a) under conditions suitable for isolating siNA molecules having improved bioavailability. Such conjugates can include ligands for cellular receptors, such as peptides derived from naturally occurring protein ligands; protein localization sequences, including cellular ZIP code sequences; antibodies; nucleic acid aptamers; vitamins and other co-factors, such as folate and N-acetylgalactosamine; polymers, such as polyethyleneglycol (PEG); phospholipids; cholesterol; polyamines, such as spermine or spermidine; and others.

[0220] In one embodiment, the invention features a double stranded short interfering nucleic acid (siNA) molecule that comprises a first nucleotide sequence complementary to a target RNA sequence or a portion thereof, and a second sequence having complementarity to said first sequence, wherein said second sequence is chemically modified in a manner that it can no longer act as a guide sequence for efficiently mediating RNA interference and/or is recognized by cellular proteins that facilitate RNAi.

[0221] In one embodiment, the invention features a double stranded short interfering nucleic acid (siNA) molecule that comprises a first nucleotide sequence complementary to a target RNA sequence or a portion thereof, and a second sequence having complementarity to said first sequence, wherein the second sequence is designed or modified in a manner that prevents its entry into the RNAi pathway as a guide sequence or as a sequence that is complementary to a target nucleic acid (e.g., RNA) sequence. Such design or modifications are expected to enhance the activity of siNA and/or improve the specificity of siNA molecules of the invention. These modifications are also expected to minimize any off-target effects and/or associated toxicity.

[0222] In one embodiment, the invention features a double stranded short interfering nucleic acid (siNA) molecule that comprises a first nucleotide sequence complementary to a target RNA sequence or a portion thereof, and a second sequence having complementarity to said first sequence, wherein said second sequence is incapable of acting as a guide sequence for mediating RNA interference.

[0223] In one embodiment, the invention features a double stranded short interfering nucleic acid (siNA) molecule that comprises a first nucleotide sequence complementary to a target RNA sequence or a portion thereof, and a second sequence having complementarity to said first sequence, wherein said second sequence does not have a terminal 5′-hydroxyl (5′-OH) or 5′-phosphate group.

[0224] In one embodiment, the invention features a double stranded short interfering nucleic acid (siNA) molecule that comprises a first nucleotide sequence complementary to a target RNA sequence or a portion thereof, and a second sequence having complementarity to said first sequence, wherein said second sequence comprises a terminal cap moiety at the 5′-end of said second sequence. In another embodiment, the terminal cap moiety comprises an inverted abasic, inverted deoxy abasic, inverted nucleotide moiety, a group shown in FIG. 22, an alkyl or cycloalkyl group, a heterocycle, or any other group that prevents RNAi activity in which the second sequence serves as a guide sequence or template for RNAi.

[0225] In one embodiment, the invention features a double stranded short interfering nucleic acid (siNA) molecule that comprises a first nucleotide sequence complementary to a target RNA sequence or a portion thereof, and a second sequence having complementarity to said first sequence, wherein said second sequence comprises a terminal cap moiety at the 5′-end and 3′-end of said second sequence. In another embodiment, each terminal cap moiety individually comprises an inverted abasic, inverted deoxy abasic, inverted nucleotide moiety, a group shown in FIG. 22, an alkyl or cycloalkyl group, a heterocycle, or any other group that prevents RNAi activity in which the second sequence serves as a guide sequence or template for RNAi.

[0226] In one embodiment, the invention features a method for generating siNA molecules of the invention with improved specificity for down regulating or inhibiting the expression of a target nucleic acid (e.g., a DNA or RNA such as a gene or its corresponding RNA), comprising (a) introducing one or more chemical modifications into the structure of a siNA molecule, and (b) assaying the siNA molecule of step (a) under conditions suitable for isolating siNA molecules having improved specificity. In another embodiment, the chemical modification used to improve specificity comprises terminal cap modifications at the 5′-end, 3′-end, or both 5′ and 3′-ends of the siNA molecule. The terminal cap modifications can comprise, for example, structures shown in FIG. 22 (e.g., inverted deoxyabasic moieties) or any other chemical modification that renders a portion of the siNA molecule (e.g., the sense strand) incapable of mediating RNA interference against an off target nucleic acid sequence. In a non-limiting example, a siNA molecule is designed such that only the antisense sequence of the siNA molecule can serve as a guide sequence for RISC mediated degradation of a corresponding target RNA sequence. This can be accomplished by rendering the sense sequence of the siNA inactive by introducing chemical modifications to the sense strand that preclude recognition of the sense strand as a guide sequence by RNAi machinery. In one embodiment, such chemical modifications comprise any chemical group at the 5′-end of the sense strand of the siNA, or any other group that serves to render the sense strand inactive as a guide sequence for mediating RNA interference. These modifications, for example, can result in a molecule where the 5′-end of the sense strand no longer has a free 5′-hydroxyl (5′-OH) or a free 5′-phosphate group (e.g., phosphate, diphosphate, triphosphate, cyclic phosphate etc.). Non-limiting examples of such siNA constructs are described herein, such as “Stab 9/10”, “Stab 7/8”, “Stab 7/19”, “Stab 17/22”, “Stab 23/24”, and “Stab 23/25” chemistries (Table IV) and variants thereof wherein the 5′-end and 3′-end of the sense strand of the siNA do not comprise a hydroxyl group or phosphate group.

[0227] In one embodiment, the invention features a method for generating siNA molecules of the invention with improved specificity for down regulating or inhibiting the expression of a target nucleic acid (e.g., a DNA or RNA such as a gene or its corresponding RNA), comprising introducing one or more chemical modifications into the structure of a siNA molecule that prevent a strand or portion of the siNA molecule from acting as a template or guide sequence for RNAi activity. In one embodiment, the inactive strand or sense region of the siNA molecule is the sense strand or sense region of the siNA molecule, i.e. the strand or region of the siNA does not have complementarity to the target nucleic acid sequence. In one embodiment, such chemical modifications comprise any chemical group at the 5′-end of the sense strand or region of the siNA that does not comprise a 5′-hydroxyl (5′-OH) or 5′-phosphate group, or any other group that serves to render the sense strand or sense region inactive as a guide sequence for mediating RNA interference. Non-limiting examples of such siNA constructs are described herein, such as “Stab 9/10”, “Stab 7/8”, “Stab 7/19”, “Stab 17/22”, “Stab 23/24”, and “Stab 23/25” chemistries (Table IV) and variants thereof wherein the 5′-end and 3′-end of the sense strand of the siNA do not comprise a hydroxyl group or phosphate group.

[0228] In one embodiment, the invention features a method for screening siNA molecules against a target nucleic acid sequence comprising, (a) generating a plurality of unmodified siNA molecules, (b) assaying the siNA molecules of step (a) under conditions suitable for isolating siNA molecules that are active in mediating RNA interference against the target nucleic acid sequence, (c) introducing chemical modifications (e.g., chemical modifications as described herein or as otherwise known in the art) into the active siNA molecules of (b), and (d) optionally re-screening the chemically modified siNA molecules of (c) under conditions suitable for isolating chemically modified siNA molecules that are active in mediating RNA interference against the target nucleic acid sequence.

[0229] In one embodiment, the invention features a method for screening siNA molecules against a target nucleic acid sequence comprising, (a) generating a plurality of chemically modified siNA molecules (e.g., siNA molecules as described herein or as otherwise known in the art), and (b) assaying the siNA molecules of step (a) under conditions suitable for isolating chemically modified siNA molecules that are active in mediating RNA interference against the target nucleic acid sequence.

[0230] In another embodiment, the invention features a method for generating siNA molecules of the invention with improved bioavailability comprising (a) introducing an excipient formulation to a siNA molecule, and (b) assaying the siNA molecule of step (a) under conditions suitable for isolating siNA molecules having improved bioavailability. Such excipients include polymers such as cyclodextrins, lipids, cationic lipids, polyamines, phospholipids, nanoparticles, receptors, ligands, and others.

[0231] In another embodiment, the invention features a method for generating siNA molecules of the invention with improved bioavailability comprising (a) introducing an excipient formulation to a siNA molecule, and (b) assaying the siNA molecule of step (a) under conditions suitable for isolating siNA molecules having improved bioavailability. Such excipients include polymers such as cyclodextrins, lipids, cationic lipids, polyamines, phospholipids, and others.

[0232] In another embodiment, the invention features a method for generating siNA molecules of the invention with improved bioavailability comprising (a) introducing nucleotides having any of Formulae or any combination thereof into a siNA molecule, and (b) assaying the siNA molecule of step (a) under conditions suitable for isolating siNA molecules having improved bioavailability.

[0233] In another embodiment, polyethylene glycol (PEG) can be covalently attached to siNA compounds of the present invention. The attached PEG can be any molecular weight, preferably from about 2,000 to about 50,000 daltons (Da).

[0234] The present invention can be used alone or as a component of a kit having at least one of the reagents necessary to carry out the in vitro or in vivo introduction of RNA to test samples and/or subjects. For example, preferred components of the kit include a siNA molecule of the invention and a vehicle that promotes introduction of the siNA into cells of interest as described herein (e.g., using lipids and other methods of transfection known in the art, see for example Beigelman et al, U.S. Pat. No. 6,395,713). The kit can be used for target validation, such as in determining gene function and/or activity, or in drug optimization, and in drug discovery (see for example Usman et al., U.S. Ser. No. 60/402,996). Such a kit can also include instructions to allow a user of the kit to practice the invention.

[0235] The term “short interfering nucleic acid”, “siNA”, “short interfering RNA”, “siRNA”, “short interfering nucleic acid molecule”, “short interfering oligonucleotide molecule”, or “chemically-modified short interfering nucleic acid molecule” as used herein refers to any nucleic acid molecule capable of inhibiting or down regulating gene expression or viral replication, for example by mediating RNA interference “RNAi” or gene silencing in a sequence-specific manner; see for example Zamore et al., 2000, Cell, 101, 25-33; Bass, 2001, Nature, 411, 428-429; Elbashir et al., 2001, Nature, 411, 494-498; and Kreutzer et al., International PCT Publication No. WO 00/44895; Zernicka-Goetz et al., International PCT Publication No. WO. 01/36646; Fire, International PCT Publication No, WO 99/32619; Plaetinck et al., International PCT Publication No. WO 00/01846; Mello and Fire, International PCT Publication No. WO 01/29058; Deschamps-Depaillette, International PCT Publication No. WO 99/07409; and Li et al., International PCT Publication No. WO 00/44914; Allshire, 2002, Science, 297, 1818-1819; Volpe et al., 2002, Science, 297, 1833-1837; Jenuwein, 2002, Science, 297, 2215-2218; and Hall et al., 2002, Science, 297, 2232-2237; Hutvagner and Zamore, 2002, Science, 297, 2056-60; McManus et al., 2002, RNA, 8, 842-850; Reinhart et al., 2002, Gene & Dev., 16, 1616-1626; and Reinhart & Bartel, 2002, Science, 297, 1831). Non limiting examples of siNA molecules of the invention are shown in FIGS. 18-20, and Table I herein. For example the siNA can be a double-stranded polynucleotide molecule comprising self-complementary sense and antisense regions, wherein the antisense region comprises nucleotide sequence that is complementary to nucleotide sequence in a target nucleic acid molecule or a portion thereof and the sense region having nucleotide sequence corresponding to the target nucleic acid sequence or a portion thereof. The siNA can be assembled from two separate oligonucleotides, where one strand is the sense strand and the other is the antisense strand, wherein the antisense and sense strands are self-complementary (i.e. each strand comprises nucleotide sequence that is complementary to nucleotide sequence in the other strand; such as where the antisense strand and sense strand form a duplex or double stranded structure, for example wherein the double stranded region is about 19 base pairs); the antisense strand comprises nucleotide sequence that is complementary to nucleotide sequence in a target nucleic acid molecule or a portion thereof and the sense strand comprises nucleotide sequence corresponding to the target nucleic acid sequence or a portion thereof. Alternatively, the siNA is assembled from a single oligonucleotide, where the self-complementary sense and antisense regions of the siNA are linked by means of a nucleic acid based or non-nucleic acid-based linker(s). The siNA can be a polynucleotide with a duplex, asymmetric duplex, hairpin or asymmetric hairpin secondary structure, having self-complementary sense and antisense regions, wherein the antisense region comprises nucleotide sequence that is complementary to nucleotide sequence in a separate target nucleic acid molecule or a portion thereof and the sense region having nucleotide sequence corresponding to the target nucleic acid sequence or a portion thereof. The siNA can be a circular single-stranded polynucleotide having two or more loop structures and a stem comprising self-complementary sense and antisense regions, wherein the antisense region comprises nucleotide sequence that is complementary to nucleotide sequence in a target nucleic acid molecule or a portion thereof and the sense region having nucleotide sequence corresponding to the target nucleic acid sequence or a portion thereof, and wherein the circular polynucleotide can be processed either in vivo or in vitro to generate an active siNA molecule capable of mediating RNAi. The siNA can also comprise a single stranded polynucleotide having nucleotide sequence complementary to nucleotide sequence in a target nucleic acid molecule or a portion thereof (for example, where such siNA molecule does not require the presence within the siNA molecule of nucleotide sequence corresponding to the target nucleic acid sequence or a portion thereof), wherein the single stranded polynucleotide can further comprise a terminal phosphate group, such as a 5′-phosphate (see for example Martinez et al., 2002, Cell., 110, 563-574 and Schwarz et al., 2002, Molecular Cell, 10, 537-568), or 5′,3′-diphosphate. In certain embodiment, the siNA molecule of the invention comprises separate sense and antisense sequences or regions, wherein the sense and antisense regions are covalently linked by nucleotide or non-nucleotide linkers molecules as is known in the art, or are alternately non-covalently linked by ionic interactions, hydrogen bonding, van der waals interactions, hydrophobic intercations, and/or stacking interactions. In certain embodiments, the siNA molecules of the invention comprise nucleotide sequence that is complementary to nucleotide sequence of a target gene. In another embodiment, the siNA molecule of the invention interacts with nucleotide sequence of a target gene in a manner that causes inhibition of expression of the target gene. As used herein, siNA molecules need not be limited to those molecules containing only RNA, but further encompasses chemically-modified nucleotides and non-nucleotides. In certain embodiments, the short interfering nucleic acid molecules of the invention lack 2′-hydroxy (2′-OH) containing nucleotides. Applicant describes in certain embodiments short interfering nucleic acids that do not require the presence of nucleotides having a 2′-hydroxy group for mediating RNAi and as such, short interfering nucleic acid molecules of the invention optionally do not include any ribonucleotides (e.g., nucleotides having a 2′-OH group). Such siNA molecules that do not require the presence of ribonucleotides within the siNA molecule to support RNAi can however have an attached linker or linkers or other attached or associated groups, moieties, or chains containing one or more nucleotides with 2′-OH groups. Optionally, siNA molecules can comprise ribonucleotides at about 5, 10, 20, 30, 40, or 50% of the nucleotide positions. The modified short interfering nucleic acid molecules of the invention can also be referred to as short interfering modified oligonucleotides “siMON.” As used herein, the term siNA is meant to be equivalent to other terms used to describe nucleic acid molecules that are capable of mediating sequence specific RNAi, for example short interfering RNA (siRNA), double-stranded RNA (dsRNA), micro-RNA (miRNA), short hairpin RNA (shRNA), short interfering oligonucleotide, short interfering nucleic acid, short interfering modified oligonucleotide, chemically-modified siRNA, post-transcriptional gene silencing RNA (ptgsRNA), and others. In addition, as used herein, the term RNAi is meant to be equivalent to other terms used to describe sequence specific RNA interference, such as post transcriptional gene silencing, translational inhibition, or epigenetics. For example, siNA molecules of the invention can be used to epigenetically silence genes at both the post-transcriptional level or the pre-transcriptional level. In a non-limiting example, epigenetic regulation of gene expression by siNA molecules of the invention can result from siNA mediated modification of chromatin structure to alter gene expression (see, for example, Verdel et al., 2004, Science, 303, 672-676; Pal-Bhadra et al., 2004, Science, 303, 669-672; Allshire, 2002, Science, 297, 1818-1819; Volpe et al., 2002, Science, 297, 1833-1837; Jenuwein, 2002, Science, 297, 2215-2218; and Hall et al., 2002, Science, 297, 2232-2237).

[0236] In one embodiment, a siNA molecule of the invention is a duplex forming oligonucleotide “DFO”, (see for example FIGS. 93-94 and Vaish et al., U.S. Ser. No. 10/727,780 filed Dec. 3, 2003).

[0237] In one embodiment, a siNA molecule of the invention is a multifunctional siNA, or a multi-targeted (see for example FIGS. 95-101 and Jadhati et al., U.S. Ser. No. 60/543,480 filed Feb. 10, 2004). The multifunctional siNA of the invention can comprise nucleotide sequence totargeting, for example, two regions of a target RNA or nucleotide sequences in two distinct target RNAs (see for example target sequences in Table 1).

[0238] By “asymmetric hairpin” as used herein is meant a linear siNA molecule comprising an antisense region, a loop portion that can comprise nucleotides or non-nucleotides, and a sense region that comprises fewer nucleotides than the antisense region to the extent that the sense region has enough complimentary nucleotides to base pair with the antisense region and form a duplex with loop. For example, an asymmetric hairpin siNA molecule of the invention can comprise an antisense region having length sufficient to mediate RNAi in a cell or in vitro system (e.g., about 19 to about 22 nucleotides) and a loop region comprising about 4 to about 8 nucleotides, and a sense region having about 3 to about 18 nucleotides that are complementary to the antisense region (see for example FIG. 74). The asymmetric hairpin siNA molecule can also comprise a 5′-terminal phosphate group that can be chemically modified (for example as shown in FIG. 75). The loop portion of the asymmetric hairpin siNA molecule can comprise nucleotides, non-nucleotides, linker molecules, or conjugate molecules as described herein.

[0239] By “asymmetric duplex” as used herein is meant a siNA molecule having two separate strands comprising a sense region and an antisense region, wherein the sense region comprises fewer nucleotides than the antisense region to the extent that the sense region has enough complimentary nucleotides to base pair with the antisense region and form a duplex. For example, an asymmetric duplex siNA molecule of the invention can comprise an antisense region having length sufficient to mediate RNAi in a cell or in vitro system (e.g., about 19 to about 22 nucleotides) and a sense region having about 3 to about 18 nucleotides that are complementary to the antisense region (see for example FIG. 74).

[0240] By “modulate” is meant that the expression of the gene, or level of RNA molecule or equivalent RNA molecules encoding one or more proteins or protein subunits, or activity of one or more proteins or protein subunits is up regulated or down regulated, such that expression, level, or activity is greater than or less than that observed in the absence of the modulator. For example, the term “modulate” can mean “inhibit,” but the use of the word “modulate” is not limited to this definition.

[0241] By “inhibit”, “down-regulate”, or “reduce”, it is meant that the expression of the gene, or level of RNA molecules or equivalent RNA molecules encoding one or more proteins or protein subunits, or activity of one or more proteins or protein subunits, is reduced below that observed in the absence of the nucleic acid molecules (e.g., siNA) of the invention. In one embodiment, inhibition, down-regulation or reduction with an siNA molecule is below that level observed in the presence of an inactive or attenuated molecule. In another embodiment, inhibition, down-regulation, or reduction with siNA molecules is below that level observed in the presence of, for example, an siNA molecule with scrambled sequence or with mismatches. In another embodiment, inhibition, down-regulation, or reduction of gene expression with a nucleic acid molecule of the instant invention is greater in the presence of the nucleic acid molecule than in its absence.

[0242] By “palindrome” or “repeat” nucleic acid sequence is meant a nucleic acid sequence whose 5′-to-3′ sequence is identical to its complementary sequence in a duplex. For example, a palindrome sequence of the invention in a duplex can comprise sequence having the same sequence when one strand of the duplex is read in the 5′-to-3′ direction (left to right) and the sequence other strand based paired to it is read in the 3′- to-5′ direction (right to left). In another example, a repeat sequence of the invention can comprise a sequence having repeated nucleotides so arranged as to provide self complementarity when the sequence self-hybridizes (e.g., 5′-AUAU . . . -3′; 5′-AAUU . . . -3′; 5′-UAUA . . . -3′; 5′-UUAA . . . -3′; 5′-CGCG . . . -3′; 5′-CCGG . . . -3′, 5′-GGCC . . . -3′; 5′-CCGG . . . -3′; or any expanded repeat thereof etc.). The palindrome or repeat sequence can comprise about 2 to about 24 nucleotides in even numbers, (e.g., 2, 4, 6, 8, 10, 12, 14, 16, 18, 20, 22, or 24 nucleotides). All that is required of the palindrome or repeat sequence is that it comprises nucleic acid sequence whose 5′-to-3′ sequence is identical when present in a duplex, either alone or as part of a longer nucleic acid sequence. The palindrome or repeat sequence of the invention can comprise chemical modificaitons as described herein that can form, for example, Watson Crick or non-Watson Crick base pairs.

[0243] By “gene”, or “target gene”, is meant, a nucleic acid that encodes an RNA, for example, nucleic acid sequences including, but not limited to, structural genes encoding a polypeptide. A gene or target gene can also encode a functional RNA (fRNA) or non-coding RNA (ncRNA), such as small temporal RNA (stRNA), micro RNA (miRNA), small nuclear RNA (snRNA), short interfering RNA (siRNA), small nucleolar RNA (snRNA), ribosomal RNA (rRNA), transfer RNA (tRNA) and precursor RNAs thereof. Such non-coding RNAs can serve as target nucleic acid molecules for siNA mediated RNA interference in modulating the activity of fRNA or ncRNA involved in functional or regulatory cellular processes. Abberant fRNA or ncRNA activity leading to disease can therefore be modulated by siNA molecules of the invention. siNA molecules targeting fRNA and ncRNA can also be used to manipulate or alter the genotype or phenotype of an organism or cell, by intervening in cellular processes such as genetic imprinting, transcription, translation, or nucleic acid processing (e.g., transamination, methylation etc.). The target gene can be a gene derived from a cell, an endogenous gene, a transgene, or exogenous genes such as genes of a pathogen, for example a virus, which is present in the cell after infection thereof. The cell containing the target gene can be derived from or contained in any organism, for example a plant, animal, protozoan, virus, bacterium, or fungus. Non-limiting examples of plants include monocots, dicots, or gymnosperms. Non-limiting examples of animals include vertebrates or invertebrates. Non-limiting examples of fungi include molds or yeasts.

[0244] By “non-canonical base pair” is meant any non-Watson Crick base pair, such as mismatches and/or wobble base pairs, including flipped mismatches, single hydrogen bond mismatches, trans-type mismatches, triple base interactions, and quadruple base interactions. Non-limiting examples of such non-canonical base pairs include, but are not limited to, AC reverse Hoogsteen, AC wobble, AU reverse Hoogsteen, GU wobble, AA N7 amino, CC 2-carbonyl-amino(H1)-N3-amino(H2), GA sheared, UC 4-carbonyl-amino, UU imino-carbonyl, AC reverse wobble, AU Hoogsteen, AU reverse Watson Crick, CG reverse Watson Crick, GC N3-amino-amino N3, AA N1-amino symmetric, AA N7-amino symmetric, GA N7-N1 amino-carbonyl, GA+ carbonyl-amino N7-N1, GG N1-carbonyl symmetric, GG N3-amino symmetric, CC carbonyl-amino symmetric, CC N3-amino symmetric, UU 2-carbonyl-imino symmetric, UU 4-carbonyl-imino symmetric, AA amino-N3, AA N1-amino, AC amino 2-carbonyl, AC N3-amino, AC N7-amino, AU amino-4-carbonyl, AU N1 -imino, AU N3-imino, AU N7-imino, CC carbonyl-amino, GA amino-N1, GA amino-N7, GA carbonyl-amino, GA N3-amino, GC amino-N3, GC carbonyl-amino, GC N3-amino, GC N7-amino, GG amino-N7, GG carbonyl-imino, GG N7-amino, GU amino-2-carbonyl, GU carbonyl-imino, GU imino-2-carbonyl, GU N7-imino, psiU imino-2-carbonyl, UC 4-carbonyl-amino, UC imino-carbonyl, UU imino-4-carbonyl, AC C2-H-N3, GA carbonyl-C2-H, UU imino-4-carbonyl 2 carbonyl-C5-H, AC amino(A) N3(C)-carbonyl, GC imino amino-carbonyl, Gpsi imino-2-carbonyl amino-2-carbonyl, and GU imino amino-2-carbonyl base pairs.

[0245] By “homologous sequence” is meant, a nucleotide sequence that is shared by one or more polynucleotide sequences, such as genes, gene transcripts and/or non-coding polynucleotides. For example, a homologous sequence can be a nucleotide sequence that is shared by two or more genes encoding related but different proteins, such as different members of a gene family (e.g., VEGF receptors such as VEGFr1, VEGFr2, and/or VEGFr3), different protein epitopes (e.g., different viral strains), different protein isoforms (e.g., VEGF A, B, C, and/or D) or completely divergent genes, such as a cytokine and its corresponding receptors (e.g., VEGF and VEGF receptors). A homologous sequence can be a nucleotide sequence that is shared by two or more non-coding polynucleotides, such as noncoding DNA or RNA, regulatory sequences, introns, and sites of transcriptional control or regulation. Homologous sequences can also include conserved sequence regions shared by more than one polynucleotide sequence. The homology does not need to be perfect homology (e.g., 100%), as partially homologous sequences are also contemplated by the instant invention (e.g., 99%, 98%, 97%, 96%, 95%, 94%, 93%, 92%, 91%, 90%, 89%, 88%, 87%, 86%, 85%, 84%, 83%, 82%, 81%, 80% etc.).

[0246] By “conserved sequence region” is meant, a nucleotide sequence of one or more regions in a polynucleotide that does not vary significantly between generations or from one biological system or organism to another biological system or organism. The polynucleotide can include both coding and non-coding DNA and RNA.

[0247] By “cancer” is meant a group of diseases characterized by uncontrolled growth and spread of abnormal cells.

[0248] By “sense region” is meant a nucleotide sequence of a siNA molecule having complementarity to an antisense region of the siNA molecule. In addition, the sense region of a siNA molecule can comprise a nucleic acid sequence having homology with a target nucleic acid sequence.

[0249] By “antisense region” is meant a nucleotide sequence of a siNA molecule having complementarity to a target nucleic acid sequence. In addition, the antisense region .of a siNA molecule can optionally comprise a nucleic acid sequence having complementarity to a sense region of the siNA molecule.

[0250] By “target nucleic acid” is meant any nucleic acid sequence whose expression or activity is to be modulated. The target nucleic acid can be DNA “target DNA” or RNA “target RNA”, such as endogenous DNA or RNA, viral DNA or viral RNA, or other RNA encoded by a gene, virus, bacteria, fungus, mammal, or plant.

[0251] By “complementarity” is meant that a nucleic acid can form hydrogen bond(s) with another nucleic acid sequence by either traditional Watson-Crick or other non-traditional types. In reference to the nucleic molecules of the present invention, the binding free energy for a nucleic acid molecule-with its complementary sequence is sufficient to allow the relevant function of the nucleic acid to proceed, e.g., RNAi activity. Determination of binding free energies for nucleic acid molecules is well known in the art (see, e.g., Turner et al., 1987, CSH Symp. Quant. Biol. LII pp.123-133; Frier et al., 1986, Proc. Nat. Acad. Sci. USA 83:9373-9377; Turner et al., 1987, J. Am. Chem. Soc. 109:3783-3785). A percent complementarity indicates the percentage of contiguous residues in a nucleic acid molecule that can form hydrogen bonds (e.g., Watson-Crick base pairing) with a second nucleic acid sequence (e.g., 5, 6, 7, 8, 9, or 10 nucleotides out of a total of 10 nucleotides in the first oligonuelcotide being based paired to a second nucleic acid sequence having 10 nucleotides represents 50%, 60%, 70%, 80%, 90%, and 100% complementary respectively). “Perfectly complementary” means that all the contiguous residues of a nucleic acid sequence will hydrogen bond with the same number of contiguous residues in a second nucleic acid sequence.

[0252] The siNA molecules of the invention represent a novel therapeutic approach to a broad spectrum of diseases and conditions, including cancer or cancerous disease, infectious disease, cardiovascular disease, neurologic disease, ocular disease, prion disease, inflammatory disease, autoimmune disease, pulmonary disease, renal disease, liver disease, mitochondrial disease, endocrine disease, reproduction related diseases and conditions as are known in the art, and any other indications that can respond to the level of an expressed gene product in a cell or organsim (see for example McSwiggen, International PCT Publication No. WO 03/74654).

[0253] By “proliferative disease” or “cancer” as used herein is meant, any disease, condition, trait, genotype or phenotype characterized by unregulated cell growth or replication as is known in the art; including AIDS related cancers such as Kaposi's sarcoma; breast cancers; bone cancers such as Osteosarcoma, Chondrosarcomas, Ewing's sarcoma, Fibrosarcomas, Giant cell tumors, Adamantinomas, and Chordomas; Brain cancers such as Meningiomas, Glioblastomas, Lower-Grade Astrocytomas, Oligodendrocytomas, Pituitary Tumors, Schwannomas, and Metastatic brain cancers; cancers of the head and neck including various lymphomas such as mantle cell lymphoma, non-Hodgkins lymphoma, adenoma, squamous cell carcinoma, laryngeal carcinoma, gallbladder and bile duct cancers, cancers of the retina such as retinoblastoma, cancers of the esophagus, gastric cancers, multiple myeloma, ovarian cancer, uterine cancer, thyroid cancer, testicular cancer, endometrial cancer, melanoma, colorectal cancer, lung cancer, bladder cancer, prostate cancer; lung cancer (including non-small cell lung carcinoma), pancreatic cancer, sarcomas, Wilms' tumor, cervical cancer, head and neck cancer, skin cancers, nasopharyngeal carcinoma, liposarcoma, epithelial carcinoma, renal cell carcinoma, gallbladder adeno carcinoma, parotid adenocarcinoma, endometrial sarcoma, multidrug resistant cancers; and proliferative diseases and conditions, such as neovascularization associated with tumor angiogenesis, macular degeneration (e.g., wet/dry AMD), corneal neovascularization, diabetic retinopathy, neovascular glaucoma, myopic degeneration and other proliferative diseases and conditions such as restenosis and polycystic kidney disease, and any other cancer or proliferative disease, condition, trait, genotype or phenotype that can respond to the modulation of disease related gene expression in a cell or tissue, alone or in combination with other therapies.

[0254] By “inflammatory disease” or “inflammatory condition” as used herein is meant any disease, condition, trait, genotype or phenotype characterized by an inflammatory or allergic process as is known in the art, such as inflammation, acute inflammation, chronic inflammation, atherosclerosis, restenosis, asthma, allergic rhinitis, atopic dermatitis, septic shock, rheumatoid arthritis, inflammatory bowl disease, inflammatory pelvic disease, pain, ocular inflammatory disease, celiac disease, Leigh Syndrome, Glycerol Kinase Deficiency, Familial eosinophilia (FE), autosomal recessive spastic ataxia, laryngeal inflammatory disease; Tuberculosis, Chronic cholecystitis, Bronchiectasis, Silicosis and other pneumoconioses, and any other inflammatory disease, condition, trait, genotype or phenotype that can respond to the modulation of disease related gene expression in a cell or tissue, alone or in combination with other therapies.

[0255] By “autoimmune disease” or “autoimmune condition” as used herein is meant, any disease, condition, trait, genotype or phenotype characterized by autoimmunity as is known in the art, such as multiple sclerosis, diabetes mellitus, lupus, celiac disease, Crohn's disease, ulcerative colitis, Guillain-Barre syndrome, scleroderms, Goodpasture's syndrome, Wegener's granulomatosis, autoimmune epilepsy, Rasmussen's encephalitis, Primary biliary sclerosis, Sclerosing cholangitis, Autoimmune hepatitis, Addison's disease, Hashimoto's thyroiditis, Fibromyalgia, Menier's syndrome; transplantation rejection (e.g., prevention of allograft rejection) pernicious anemia, rheumatoid arthritis, systemic lupus erythematosus, dermatomyositis, Sjogren's syndrome, lupus erythematosus, multiple sclerosis, myasthenia gravis, Reiter's syndrome, Grave's disease, and any other autoimmune disease, condition, trait, genotype or phenotype that can respond to the modulation of disease related gene expression in a cell or tissue, alone or in combination with other therapies.

[0256] By “nuerologic disease” or “neurological disease” is meant any disease, disorder, or condition affecting the central or peripheral nervous system, including ADHD, AIDS—Neurological Complications, Absence of the Septum Pellucidum, Acquired Epileptiform Aphasia, Acute Disseminated Encephalomyelitis, Adrenoleukodystrophy, Agenesis of the Corpus Callosum, Agnosia, Aicardi Syndrome, Alexander Disease, Alpers' Disease, Alternating Hemiplegia, Alzheimer's Disease, Amyotrophic Lateral Sclerosis, Anencephaly, Aneurysm, Angelman Syndrome, Angiomatosis, Anoxia, Aphasia, Apraxia, Arachnoid Cysts, Arachnoiditis, Arnold-Chiari Malformation, Arteriovenous Malformation, Aspartame, Asperger Syndrome, Ataxia Telangiectasia, Ataxia, Attention Deficit-Hyperactivity Disorder, Autism, Autonomic Dysfunction, Back Pain, Barth Syndrome, Batten Disease, Behcet's Disease, Bell's Palsy, Benign Essential Blepharospasm, Benign Focal Amyotrophy, Benign Intracranial Hypertension, Bernhardt-Roth Syndrome, Binswanger's Disease, Blepharospasm, Bloch-Sulzberger Syndrome, Brachial Plexus Birth Injuries, Brachial Plexus Injuries, Bradbury-Eggleston Syndrome, Brain Aneurysm, Brain Injury, Brain and Spinal Tumors, Brown-Sequard Syndrome, Bulbospinal Muscular Atrophy, Canavan Disease, Carpal Tunnel Syndrome, Causalgia, Cavernomas, Cavernous Angioma, Cavernous Malformation, Central Cervical Cord Syndrome, Central Cord Syndrome, Central Pain Syndrome, Cephalic Disorders, Cerebellar Degeneration, Cerebellar Hypoplasia, Cerebral Aneurysm, Cerebral Arteriosclerosis, Cerebral Atrophy, Cerebral Beriberi, Cerebral Gigantism, Cerebral Hypoxia, Cerebral Palsy, Cerebro-Oculo-Facio-Skeletal Syndrome, Charcot-Marie-Tooth Disorder, Chiari Malformation, Chorea, Choreoacanthocytosis, Chronic Inflammatory Demyelinating Polyneuropathy (CIDP), Chronic Orthostatic Intolerance, Chronic Pain, Cockayne Syndrome Type II, Coffin Lowry Syndrome, Coma, including Persistent Vegetative State, Complex Regional Pain Syndrome, Congenital Facial Diplegia, Congenital Myasthenia, Congenital Myopathy, Congenital Vascular Cavernous Malformations, Corticobasal Degeneration, Cranial Arteritis, Craniosynostosis, Creutzfeldt-Jakob Disease, Cumulative Trauma Disorders, Cushing's Syndrome, Cytomegalic Inclusion Body Disease (CIBD), Cytomegalovirus Infection, Dancing Eyes-Dancing Feet Syndrome, Dandy-Walker Syndrome, Dawson Disease, De Morsier's Syndrome, Dejerine-Klumpke Palsy, Dementia—Multi-Infarct, Dementia—Subcortical, Dementia With Lewy Bodies, Dermatomyositis, Developmental Dyspraxia, Devic's Syndrome, Diabetic Neuropathy, Diffuse Sclerosis, Dravet's Syndrome, Dysautonomia, Dysgraphia, Dyslexia, Dysphagia, Dyspraxia, Dystonias, Early Infantile Epileptic Encephalopathy, Empty Sella Syndrome, Encephalitis Lethargica, Encephalitis and Meningitis, Encephaloceles, Encephalopathy, Encephalotrigeminal Angiomatosis, Epilepsy, Erb's Palsy, Erb-Duchenne and Dejerine-Klumpke Palsies, Fabry's Disease, Fahr's Syndrome, Fainting, Familial Dysautonomia, Familial Hemangioma, Familial Idiopathic Basal Ganglia Calcification, Familial Spastic Paralysis, Febrile Seizures (e.g., GEFS and GEFS plus), Fisher Syndrome, Floppy Infant Syndrome, Friedreich's Ataxia, Gaucher's Disease, Gerstmann's Syndrome, Gerstmann-Straussler-Scheinker Disease, Giant Cell Arteritis, Giant Cell Inclusion Disease, Globoid Cell Leukodystrophy, Glossopharyngeal Neuralgia, Guillain-Barre Syndrome, HTLV-1 Associated Myelopathy, Hallervorden-Spatz Disease, Head Injury, Headache, Hemicrania Continua, Hemifacial Spasm, Hemiplegia Alterans, Hereditary Neuropathies, Hereditary Spastic Paraplegia, Heredopathia Atactica Polyneuritiformis, Herpes Zoster Oticus, Herpes Zoster, Hirayama Syndrome, Holoprosencephaly, Huntington's Disease, Hydranencephaly, Hydrocephalus—Normal Pressure, Hydrocephalus, Hydromyelia, Hypercortisolism, Hypersomnia, Hypertonia, Hypotonia, Hypoxia, Immune-Mediated Encephalomyelitis, Inclusion Body Myositis, Incontinentia Pigmenti, Infantile Hypotonia, Infantile Phytanic Acid Storage Disease, Infantile Refsum Disease, Infantile Spasms, Inflammatory Myopathy, Intestinal Lipodystrophy, Intracranial Cysts, Intracranial Hypertension, Isaac's Syndrome, Joubert Syndrome, Kearns-Sayre Syndrome, Kennedy's Disease, Kinsboume syndrome, Kleine-Levin syndrome, Klippel Feil Syndrome, Klippel-Trenaunay Syndrome (KTS), Klüver-Bucy Syndrome, Korsakoffs Amnesic Syndrome, Krabbe Disease, Kugelberg-Welander Disease, Kuru, Lambert-Eaton Myasthenic Syndrome, Landau-Kleffner Syndrome, Lateral Femoral Cutaneous Nerve Entrapment, Lateral Medullary Syndrome, Learning Disabilities, Leigh's Disease, Lennox-Gastaut Syndrome, Lesch-Nyhan Syndrome, Leukodystrophy, Levine-Critchley Syndrome, Lewy Body Dementia, Lissencephaly, Locked-In Syndrome, Lou Gehrig's Disease, Lupus—Neurological Sequelae, Lyme Disease—Neurological Complications, Machado-Joseph Disease, Macrencephaly; Megalencephaly; Melkersson-Rosenthal Syndrome, Meningitis, Menkes Disease, Meralgia Paresthetica, Metachromatic Leukodystrophy, Microcephaly, Migraine, Miller Fisher Syndrome, Mini-Strokes, Mitochondrial Myopathies, Mobius Syndrome, Monomelic Amyotrophy, Motor Neuron Diseases, Moyamoya Disease, Mucolipidoses, Mucopolysaccharidoses, Multi-Infarct Dementia, Multifocal Motor Neuropathy, Multiple Sclerosis, Multiple System Atrophy with Orthostatic Hypotension, Multiple System Atrophy, Muscular Dystrophy, Myasthenia—Congenital, Myasthenia Gravis, Myelinoclastic Diffuse Sclerosis, Myoclonic Encephalopathy of Infants, Myoclonus, Myopathy—Congenital, Myopathy—Thyrotoxic, Myopathy, Myotonia Congenita, Myotonia, Narcolepsy, Neuroacanthocytosis, Neuro degeneration with Brain Iron Accumulation, Neurofibromatosis, Neuroleptic Malignant Syndrome, Neurological Complications of AIDS, Neurological Manifestations of Pompe Disease, Neuromyelitis Optica, Neuromyotonia, Neuronal Ceroid Lipofuscinosis, Neuronal Migration Disorders, Neuropathy—Hereditary, Neurosarcoidosis, Neurotoxicity, Nevus Cavernosus, Niemann-Pick Disease, O'Sullivan-McLeod Syndrome, Occipital Neuralgia, Occult Spinal Dysraphism Sequence, Ohtahara Syndrome, Olivopontocerebellar Atrophy, Opsoclonus Myoclonus, Orthostatic Hypotension, Overuse Syndrome, Pain—Chronic, Paraneoplastic Syndromes, Paresthesia, Parkinson's Disease, Parmyotonia Congenita, Paroxysmal Choreoathetosis, Paroxysmal Hemicrania, Parry-Romberg, Pelizaeus-Merzbacher Disease, Pena Shokeir II Syndrome, Perineural Cysts, Periodic Paralyses, Peripheral Neuropathy, Periventricular Leukomalacia, Persistent Vegetative State, Pervasive Developmental Disorders, Phytanic Acid Storage Disease, Pick's Disease, Piriformis Syndrome, Pituitary Tumors, Polymyositis, Pompe Disease, Porencephaly, Post-Polio Syndrome, Postherpetic Neuralgia, Postinfectious Encephalomyelitis, Postural Hypotension, Postural Orthostatic Tachycardia Syndrome, Postural Tachycardia Syndrome, Primary Lateral Sclerosis, Prion Diseases, Progressive Hemifacial Atrophy, Progressive Locomotor Ataxia, Progressive Multifocal Leukoencephalopathy, Progressive Sclerosing Poliodystrophy, Progressive Supranuclear Palsy, Pseudotumor Cerebri, Pyridoxine Dependent and Pyridoxine Responsive Siezure Disorders, Ramsay Hunt Syndrome Type I, Ramsay Hunt Syndrome Type II, Rasmussen's Encephalitis and other autoimmune epilepsies, Reflex Sympathetic Dystrophy Syndrome, Refsum Disease—Infantile, Refsum Disease, Repetitive Motion Disorders, Repetitive Stress Injuries, Restless Legs Syndrome, Retrovirus-Associated Myelopathy, Rett Syndrome, Reye's Syndrome, Riley-Day Syndrome, SUNCT Headache, Sacral Nerve Root Cysts; Saint Vitus Dance, Salivary Gland Disease; Sandhoff Disease, Schilder's Disease, Schizencephaly, Seizure Disorders, Septo-Optic Dysplasia, Severe Myoclonic Epilepsy of Infancy (SMEI), Shaken Baby Syndrome, Shingles, Shy-Drager Syndrome, Sjogren's Syndrome, Sleep Apnea, Sleeping Sickness, Soto's Syndrome, Spasticity, Spina Bifida, Spinal Cord Infarction, Spinal Cord Injury, Spinal Cord Tumors, Spinal Muscular Atrophy, Spinocerebellar Atrophy, Steele-Richardson-Olszewski Syndrome, Stiff-Person Syndrome, Striatonigral Degeneration, Stroke, Sturge-Weber Syndrome, Subacute Sclerosing Panencephalitis, Subcortical Arteriosclerotic Encephalopathy, Swallowing Disorders, Sydenham Chorea, Syncope, Syphilitic Spinal Sclerosis, Syringohydromyelia, Syringomyelia, Systemic Lupus Erythematosus, Tabes Dorsalis, Tardive Dyskinesia, Tarlov Cysts, Tay-Sachs Disease, Temporal Arteritis, Tethered Spinal Cord Syndrome, Thomsen Disease, Thoracic Outlet Syndrome, Thyrotoxic Myopathy, Tic Douloureux, Todd's Paralysis, Tourette Syndrome, Transient Ischemic Attack, Transmissible Spongiform Encephalopathies, Transverse Myelitis, Traumatic Brain Injury, Tremor, Trigeminal Neuralgia, Tropical Spastic Paraparesis, Tuberous Sclerosis, Vascular Erectile Tumor, Vasculitis including Temporal Arteritis, Von Economo's Disease, Von Hippel-Lindau disease (VHL), Von Recklinghausen's Disease, Wallenberg's Syndrome, Werdnig-Hoffman Disease, Wernicke-Korsakoff Syndrome, West Syndrome, Whipple's Disease, Williams Syndrome, Wilson's Disease, X-Linked Spinal and Bulbar Muscular Atrophy, and Zellweger Syndrome.

[0257] By “infectious disease” as used herein is meant any disease, condition, trait, genotype or phenotype associated with an infectious agent, such as a virus, bacteria, fungus, prion, or parasite. Non-limiting examples of various viral genes that can be targeted using siNA molecules of the invention include Hepatitis C Virus (HCV, for example Genbank Accession Nos: D11168, D50483.1, L38318 and S82227), Hepatitis B Virus (HBV, for example GenBank Accession No. AF100308.1), Human Immunodeficiency Virus type 1 (HIV-1, for example GenBank Accession No. U51188), Human Immunodeficiency Virus type 2 (HIV-2, for example GenBank Accession No. X60667), West Nile Virus (WNV for example GenBank accession No. NC_{—}001563), cytomegalovirus (CMV for example GenBank Accession No. NC_{—}001347), respiratory syncytial virus (RSV for example GenBank Accession No. NC_{—}001781), influenza virus (for example example GenBank Accession No. AF037412, rhinovirus (for example, GenBank accession numbers: D00239, X02316, X01087, L24917, M16248, K02121, X01087), papillomavirus (for example GenBank Accession No. NC_{—}001353), Herpes Simplex Virus (HSV for example GenBank Accession No. NC_{—}001345), and other viruses such as HTLV (for example GenBank Accession No. AJ430458). Due to the high sequence variability of many viral genomes, selection of siRNA molecules for broad therapeutic applications would likely involve the conserved regions of the viral genome. Nonlimiting examples of conserved regions of the viral genomes include but are not limited to 5′-Non Coding Regions (NCR), 3′-Non Coding Regions (NCR) and/or internal ribosome entry sites (IRES). siRNA molecules designed against conserved regions of various viral genomes will enable efficient inhibition of viral replication in diverse patient populations and may ensure the effectiveness of the siRNA molecules against viral quasi species which evolve due to mutations in the non-conserved regions of the viral genome. Non-limiting examples of bacterial infections include Actinomycosis, Anthrax, Aspergillosis, Bacteremia, Bacterial Infections and Mycoses, Bartonella Infections, Botulism, Brucellosis, Burkholderia Infections, Campylobacter Infections, Candidiasis, Cat-Scratch Disease, Chlamydia Infections, Cholera, Clostridium Infections, Coccidioidomycosis, Cross Infection, Cryptococcosis, Dermatomycoses, Dermatomycoses, Diphtheria, Ehrlichiosis, Escherichia coli Infections, Fasciitis, Necrotizing, Fusobacterium Infections, Gas Gangrene, Gram-Negative Bacterial Infections, Gram-Positive Bacterial Infections, Histoplasmosis, Impetigo, Klebsiella Infections, Legionellosis, Leprosy, Leptospirosis, Listeria Infections, Lyme Disease, Maduromycosis, Melioidosis, Mycobacterium Infections, Mycoplasma Infections, Mycoses, Nocardia Infections, Onychomycosis, Ornithosis, Plague, Pneumococcal Infections, Pseudomonas Infections, Q Fever, Rat-Bite Fever, Relapsing Fever, Rheumatic Fever, Rickettsia Infections, Rocky Mountain Spotted Fever, Salmonella Infections, Scarlet Fever, Scrub Typhus, Sepsis, Sexually Transmitted Diseases—Bacterial, Bacterial Skin Diseases, Staphylococcal Infections, Streptococcal Infections, Tetanus, Tick-Borne Diseases, Tuberculosis, Tularemia, Typhoid Fever, Typhus, Epidemic Louse-Borne, Vibrio Infections, Yaws, Yersinia Infections, Zoonoses, and Zygomycosis. Non-limiting examples of fungal infections include Aspergillosis, Blastomycosis, Coccidioidomycosis, Cryptococcosis, Fungal Infections of Fingernails and Toenails, Fungal Sinusitis, Histoplasmosis, Histoplasmosis, Mucormycosis, Nail Fungal Infection, Paracoccidioidomycosis, Sporotrichosis, Valley Fever (Coccidioidomycosis), and Mold Allergy.

[0258] By “ocular disease” as used herein is meant, any disease, condition, trait, genotype or phenotype of the eye and related structures, such as Cystoid Macular Edema, Asteroid Hyalosis, Pathological Myopia and Posterior Staphyloma, Toxocariasis (Ocular Larva Migrans), Retinal Vein Occlusion, Posterior Vitreous Detachment, Tractional Retinal Tears, Epiretinal Membrane, Diabetic Retinopathy, Lattice Degeneration, Retinal Vein Occlusion, Retinal Artery Occlusion, Macular Degeneration (e.g., age related macular degeneration such as wet AMD or dry AMD), Toxoplasmosis, Choroidal Melanoma, Acquired Retinoschisis, Hollenhorst Plaque, Idiopathic Central Serous Chorioretinopathy, Macular Hole, Presumed Ocular Histoplasmosis Syndrome, Retinal Macroaneursym, Retinitis Pigmentosa, Retinal Detachment, Hypertensive Retinopathy, Retinal Pigment Epithelium (RPE) Detachment, Papillophlebitis, Ocular Ischemic Syndrome, Coats' Disease, Leber's Miliary Aneurysm, Conjunctival Neoplasms, Allergic Conjunctivitis, Vernal Conjunctivitis, Acute Bacterial Conjunctivitis, Allergic Conjunctivitis & Vernal Keratoconjunctivitis, Viral Conjunctivitis, Bacterial Conjunctivitis, Chlamydial & Gonococcal Conjunctivitis, Conjunctival Laceration, Episcleritis, Scleritis, Pingueculitis, Pterygium, Superior Limbic Keratoconjunctivitis (SLK of Theodore), Toxic Conjunctivitis, Conjunctivitis with Pseudomembrane, Giant Papillary Conjunctivitis, Tenien's Marginal Degeneration, Acanthamoeba Keratitis, Fungal Keratitis, Filamentary Keratitis, Bacterial Keratitis, Keratitis Sicca/Dry Eye Syndrome, Bacterial Keratitis, Herpes Simplex Keratitis, Sterile Corneal Infiltrates, Phlyctenulosis, Corneal Abrasion & Recurrent Corneal Erosion, Corneal Foreign Body, Chemical Burs, Epithelial Basement Membrane Dystrophy (EBMD), Thygeson's Superficial Punctate Keratopathy, Corneal Laceration, Salzmann's Nodular Degeneration, Fuchs' Endothelial Dystrophy, Crystalline Lens Subluxation, Ciliary-Block Glaucoma, Primary Open-Angle Glaucoma, Pigment Dispersion Syndrome and Pigmentary Glaucoma, Pseudoexfoliation Syndrom and Pseudoexfoliative Glaucoma, Anterior Uveitis, Primary Open Angle Glaucoma, Uveitic Glaucoma & Glaucomatocyclitic Crisis, Pigment Dispersion Syndrome & Pigmentary Glaucoma, Acute Angle Closure Glaucoma, Anterior Uveitis, Hyphema, Angle Recession Glaucoma, Lens Induced Glaucoma, Pseudoexfoliation Syndrome and Pseudoexfoliative Glaucoma, Axenfeld-Rieger Syndrome, Neovascular Glaucoma, Pars Planitis, Choroidal Rupture, Duane's Retraction Syndrome, Toxic/Nutritional Optic Neuropathy, Aberrant Regeneration of Cranial Nerve III, Intracranial Mass Lesions, Carotid-Cavernous Sinus Fistula, Anterior Ischemic Optic Neuropathy, Optic Disc Edema & Papilledema, Cranial Nerve III Palsy, Cranial Nerve IV Palsy, Cranial Nerve VI Palsy, Cranial Nerve VII (Facial Nerve) Palsy, Horner's Syndrome, Internuclear Ophthalmoplegia, Optic Nerve Head Hypoplasia, Optic Pit, Tonic Pupil, Optic Nerve Head Drusen, Demyelinating Optic Neuropathy (Optic Neuritis, Retrobulbar Optic Neuritis), Amaurosis Fugax and Transient Ischemic Attack, Pseudotumor Cerebri, Pituitary Adenoma, Molluscum Contagiosum, Canaliculitis, Verruca and Papilloma, Pediculosis and Pthiriasis, Blepharitis, Hordeolum, Preseptal Cellulitis, Chalazion, Basal Cell Carcinoma, Herpes Zoster Ophthalmicus, Pediculosis & Phthiriasis, Blow-out Fracture, Chronic Epiphora, Dacryocystitis, Herpes Simplex Blepharitis, Orbital Cellulitis, Senile Entropion, and Squamous Cell Carcinoma.

[0259] In one embodiment of the present invention, each sequence of a siNA molecule of the invention is independently about 18 to about 24 nucleotides in length, in specific embodiments about 18, 19, 20, 21, 22, 23, or 24 nucleotides in length. In another embodiment, the siNA duplexes of the invention independently comprise about 17 to about 23 base pairs (e.g., about 17, 18, 19, 20, 21, 22 or 23). In yet another embodiment, siNA molecules of the invention comprising hairpin or circular structures are about 35 to about 55 (e.g., about 35, 40, 45, 50 or 55) nucleotides in length, or about 38 to about 44 (e.g., 38, 39, 40, 41, 42, 43 or 44) nucleotides in length and comprising about 16 to about 22 (e.g., about 16, 17, 18, 19, 20, 21 or 22) base pairs. Exemplary siNA molecules of the invention are shown in Table I. and/or FIGS. 18-19.

[0260] As used herein “cell” is used in its usual biological sense, and does not refer to an entire multicellular organism, e.g., specifically does not refer to a human. The cell can be present in an organism, e.g., birds, plants and mammals such as humans, cows, sheep, apes, monkeys, swine, dogs, and cats. The cell can be prokaryotic (e.g., bacterial cell) or eukaryotic (e.g., mammalian or plant cell). The cell can be of somatic or germ line origin, totipotent or pluripotent, dividing or non-dividing. The cell can also be derived from or can comprise a gamete or embryo, a stem cell, or a fully differentiated cell.

[0261] The siNA molecules of the invention are added directly, or can be complexed with cationic lipids, packaged within liposomes, or otherwise delivered to target cells or tissues. The nucleic acid or nucleic acid complexes can be locally administered to relevant tissues ex vivo, or in vivo. through injection, infusion pump or stent, with or without their incorporation in biopolymers. In particular embodiments, the nucleic acid molecules of the invention comprise sequences shown in Table I and/or FIGS. 18-19. Examples of such nucleic acid molecules consist essentially of sequences defined in these tables and figures. Furthermore, the chemically modified constructs described in Table IV can be applied to any siNA sequence of the invention.

[0262] In another aspect, the invention provides mammalian cells containing one or more siNA molecules of this invention. The one or more siNA molecules can independently be targeted to the same or different sites.

[0263] By “RNA” is meant a molecule comprising at least one ribonucleotide residue. By “ribonucleotide” is meant a nucleotide with a hydroxyl group at the 2′ position of a β-D-ribo-furanose moiety. The terms include double-stranded RNA, single-stranded RNA, isolated RNA such as partially purified RNA, essentially pure RNA, synthetic RNA, recombinantly produced RNA, as well as altered RNA that differs from naturally occurring RNA by the addition, deletion, substitution and/or alteration of one or more nucleotides. Such alterations can include addition of non-nucleotide material, such as to the end(s) of the siNA or internally, for example at one or more nucleotides of the RNA. Nucleotides in the RNA molecules of the instant invention can also comprise non-standard nucleotides, such as non-naturally occurring nucleotides or chemically synthesized nucleotides or deoxynucleotides. These altered RNAs can be referred to as analogs or analogs of naturally-occurring RNA.

[0264] By “subject” is meant an organism, which is a donor or recipient of explanted cells or the cells themselves. “Subject” also refers to an organism to which the nucleic acid molecules of the invention can be administered. A subject can be a mammal or mammalian cells, including a human or human cells.

[0265] The term “ligand” refers to any compound or molecule, such as a drug, peptide, hormone, or neurotransmitter, that is capable of interacting with another compound, such as a receptor, either directly or indirectly. The receptor that interacts with a ligand can be present on the surface of a cell or can alternately be an intercullular receptor. Interaction of the ligand with the receptor can result in a biochemical reaction, or can simply be a physical interaction or association.

[0266] The term “phosphorothioate” as used herein refers to an internucleotide linkage having Formula I, wherein Z and/or W comprise a sulfur atom. Hence, the term phosphorothioate refers to both phosphorothioate and phosphorodithioate internucleotide linkages.

[0267] The term “phosphonoacetate” as used herein refers to an internucleotide linkage having Formula I, wherein Z and/or W comprise an acetyl or protected acetyl group.

[0268] The term “thiophosphonoacetate” as used herein refers to an internucleotide linkage having Formula I, wherein Z comprises an acetyl or protected acetyl group and W comprises a sulfur atom or alternately W comprises an acetyl or protected acetyl group and Z comprises a sulfur atom.

[0269] The term “universal base” as used herein refers to nucleotide base analogs that form base pairs with each of the natural DNA/RNA bases with little discrimination between them. Non-limiting examples of universal bases include C-phenyl, C-naphthyl and other aromatic derivatives, inosine, azole carboxamides, and nitroazole derivatives such as 3-nitropyrrole, 4-nitroindole, 5-nitroindole, and 6-nitroindole as known in the art (see for example Loakes, 2001, Nucleic Acids Research, 29, 2437-2447).

[0270] The term “acyclic nucleotide” as used herein refers to any nucleotide having an acyclic ribose sugar, for example where any of the ribose carbons (C1, C2, C3, C4, or C5), are independently or in combination absent from the nucleotide.

[0271] The nucleic acid molecules of the instant invention, individually, or in combination or in conjunction with other drugs, can be used to treat diseases or conditions discussed herein (e.g., cancers and other proliferative conditions, viral infection, inflammatory disease, autoimmunity, pulmonary disease, renal disease, ocular disease, etc.). For example, to treat a particular disease, condition, trait, genotype or phenotype, the siNA molecules can be administered to a subject or can be administered to other appropriate cells evident to those skilled in the art, individually or in combination with one or more drugs under conditions suitable for the treatment.

[0272] In one embodiment, the invention features a method for treating or preventing a disease, condition, trait, genotype or phenotype in a subject, wherein the disease, condition, trait, genotype or phenotype is related to angiogenesis or neovascularization, comprising administering to the subject a siNA molecule of the invention under conditions suitable for the treatment or prevention of the disease, condition, trait, genotype or phenotype in the subject, alone or in conjunction with one or more other therapeutic compounds. In another embodiment, the disease, condition, trait, genotype or phenotype comprises tumor angiogenesis and cancerous conditions herein, including but not limited to breast cancer, lung cancer (including non-small cell lung carcinoma), prostate cancer, colorectal cancer, brain cancer, esophageal cancer, bladder cancer, pancreatic cancer, cervical cancer, head and neck cancer, skin cancers, nasopharyngeal carcinoma, liposarcoma, epithelial carcinoma, renal cell carcinoma, gallbladder adeno carcinoma, parotid adenocarcinoma, ovarian cancer, melanoma, lymphoma, glioma, endometrial sarcoma, multidrug resistant cancers, diabetic retinopathy, macular degeneration, age related macular degeneration, neovascular glaucoma, myopic degeneration, arthritis, psoriasis, endometriosis, female reproduction, verruca vulgaris, angiofibroma of tuberous sclerosis, pot-wine stains, Sturge Weber syndrome, Kippel-Trenaunay-Weber syndrome, Osler-Weber-Rendu syndrome, renal disease such as Autosomal dominant polycystic kidney disease (ADPKD), restenosis, arteriosclerosis, and any other diseases or conditions that are related to gene expression or will respond to RNA interference in a cell or tissue, alone or in combination with other therapies.

[0273] In one embodiment, the invention features a method for treating or preventing an ocular disease, condition, trait, genotype or phenotype in a subject, wherein the ocular disease, condition, trait, genotype or phenotype is related to angiogenesis or neovascularization, comprising administering to the subject a siNA molecule of the invention under conditions suitable for the treatment or prevention of the disease, condition, trait, genotype or phenotype in the subject, alone or in conjunction with one or more other therapeutic compounds. In another embodiment, the ocular disease, condition, trait, genotype or phenotype comprises macular degeneration, age related macular degeneration, diabetic retinopathy, neovascular glaucoma, myopic degeneration, trachoma, scarring of the eye, cataract, ocular inflammation and/or ocular infections.

[0274] In one embodiment, the invention features a method for treating or preventing tumor angiogenesis in a subject, comprising administering to the subject a siNA molecule of the invention under conditions suitable for the treatment or prevention of tumor angiogenesis in the subject, alone or in conjunction with one or more other therapeutic compounds.

[0275] In one embodiment, the invention features a method for treating or preventing viral infection or replication in a subject, comprising administering to the subject a siNA molecule of the invention under conditions suitable for the treatment or prevention of viral infection or replication in the subject, alone or in conjunction with one or more other therapeutic compounds.

[0276] In one embodiment, the invention features a method for treating or preventing autoimmune disease in a subject, comprising administering to the subject a siNA molecule of the invention under conditions suitable for the treatment or prevention of autoimmune disease in the subject, alone or in conjunction with one or more other therapeutic compounds.

[0277] In one embodiment, the invention features a method for treating or preventing inflammation in a subject, comprising administering to the subject a siNA molecule of the invention under conditions suitable for the treatment or prevention of inflammation in the subject, alone or in conjunction with one or more other therapeutic compounds.

[0278] In a further embodiment, the siNA molecules can be used in combination with other known treatments to treat conditions or diseases discussed above. For example, the described molecules could be used in combination with one or more known therapeutic agents to treat a disease, condition, trait, genotype or phenotype. Non-limiting examples of other therapeutic agents that can be readily combined with a siNA molecule of the invention are enzymatic nucleic acid molecules, allosteric nucleic acid molecules, antisense, decoy, or aptamer nucleic acid molecules, antibodies such as monoclonal antibodies, small molecules, and other organic and/or inorganic compounds including metals, salts and ions.

[0279] In one embodiment, the invention features a method for treating or preventing a disease or condition in a subject, wherein the disease or condition is related to angiogenesis or neovascularization, comprising administering to the subject a siNA molecule of the invention under conditions suitable for the treatment or prevention of the disease or condition in the subject, alone or in conjunction with one or more other therapeutic compounds. In another embodiment, the disease or condition resulting from angiogenesis, such as tumor angiogenesis leading to cancer, such as without limitation to breast cancer, lung cancer (including non-small cell lung carcinoma), prostate cancer, colorectal cancer, brain cancer, esophageal cancer, bladder cancer, pancreatic cancer, cervical cancer, head and neck cancer, skin cancers, nasopharyngeal carcinoma, liposarcoma, epithelial carcinoma, renal cell carcinoma, gallbladder adeno carcinoma, parotid adenocarcinoma, ovarian cancer, melanoma, lymphoma, glioma, endometrial sarcoma, and multidrug resistant cancers, diabetic retinopathy, macular degeneration, age related macular degeneration, macular adema, neovascular glaucoma, myopic degeneration, arthritis, psoriasis, endometriosis, female reproduction, verruca vulgaris, angiofibroma of tuberous sclerosis, pot-wine stains, Sturge Weber syndrome, Kippel-Trenaunay-Weber syndrome, Osler-Weber-Rendu syndrome, renal disease such as Autosomal dominant polycystic kidney disease (ADPKD), restenosis, arteriosclerosis, and any other diseases or conditions that are related to gene expression or will respond to RNA interference in a cell or tissue, alone or in combination with other therapies.

[0280] In one embodiment, the invention features a method for treating or preventing an ocular disease or condition in a subject, wherein the ocular disease or condition is related to angiogenesis or neovascularization (such as those involving genes in the vascular endothelial growth factor, VEGF pathway or TGF-beta pathway), comprising administering to the subject a siNA molecule of the invention under conditions suitable for the treatment or prevention of the disease or condition in the subject, alone or in conjunction with one or more other therapeutic compounds. In another embodiment, the ocular disease or condition comprises macular degeneration, age related macular degeneration, diabetic retinopathy, macular adema, neovascular glaucoma, myopic degeneration, trachoma, scarring of the eye, cataract, ocular inflammation and/or ocular infections.

[0281] In one embodiment, the invention features a method of locally administering (e.g., by injection, such as intraocular, intratumoral, periocular, intracranial, etc., topical administration, catheter or the like) to a tissue or cell (e.g., ocular or retinal, brain, CNS) a siNA molecule or a vector expressing siNA molecule, comprising nucleotide sequence that is complementary to nucleotide sequence of target RNA, or a portion thereof, (e.g., target RNA encoding VEGF or a VEGF receptor) comprising contacting said tissue of cell with said double stranded RNA under conditions suitable for said local administration.

[0282] In one embodiment, the invention features a method of topically administering (e.g. by dermal, transdermal, hair follicle administration etc.,) to a tissue, organ or cell (e.g., skin, hair follicle) a siNA molecule or a vector expressing siNA molecule, comprising nucleotide sequence that is complementary to nucleotide sequence of target RNA, or a portion thereof, expressed in such organ, cell or tissue (e.g., hairless gene, 5-alpha reductase, nude gene, desmoglein 4 gene, TGF-beta, PDGF, BCL-2 and the like) comprising contacting said tissue of cell with said double stranded RNA under conditions suitable for said topical administration. Such topical administration can be used to treat dermatological disease, indication, conditions, trait, genotype or phenotype, or for cosmetic applications such as acne, psoriasis, melanoma, allopecia, hair removal etc. In one embodiment, the invention features a method of systemically administering (e.g., by injection, such as subcutaneous, intravenous, topical administration, or the like) to a tissue or cell in a subject, a double stranded RNA formed by a siNA molecule or a vector expressing siNA molecule comprising nucleotide sequence that is complementary to nucleotide sequence of target RNA, or a portion thereof, (e.g., target RNA encoding VEGF or a VEGF receptor) comprising contacting said subject with said double stranded RNA under conditions suitable for said systemic administration.

[0283] In one embodiment, the invention features a method for treating or preventing tumor angiogenesis in a subject comprising administering to the subject a siNA molecule of the invention under conditions suitable for the treatment or prevention of tumor angiogenesis in the subject, alone or in conjunction with one or more other therapeutic compounds.

[0284] In one embodiment, the invention features a method for treating or preventing viral infection or replication in a subject comprising administering to the subject a siNA molecule of the invention under conditions suitable for the treatment or prevention of viral infection or replication in the subject, alone or in conjunction with one or more other therapeutic compounds.

[0285] In one embodiment, the invention features a method for treating or preventing autoimmune disease in a subject comprising administering to the subject a siNA molecule of the invention under conditions suitable for the treatment or prevention of autoimmune disease in the subject, alone or in conjunction with one or more other therapeutic compounds.

[0286] In one embodiment, the invention features a method for treating or preventing neurologic disease (e.g., Alzheimer's disease, Huntington disease, Parkinson disease, ALS, multiple sclerosis, epilepsy, etc.) in a subject comprising administering to the subject a siNA molecule of the invention under conditions suitable for the treatment or prevention of neurologic disease in the subject, alone or in conjunction with one or more other therapeutic compounds.

[0287] In one embodiment, the invention features a method for treating or preventing inflammation in a subject comprising administering to the subject a siNA molecule of the invention under conditions suitable for the treatment or prevention of inflammation in the subject, alone or in conjunction with one or more other therapeutic compounds.

[0288] Other features and advantages of the invention will be apparent from the following description of the preferred embodiments thereof, and from the claims.

### BRIEF DESCRIPTION OF THE DRAWINGS

[0289] FIG. 1 shows a non-limiting example of a scheme for the synthesis of siNA molecules. The complementary siNA sequence strands, strand 1 and strand 2, are synthesized in tandem and are connected by a cleavable linkage, such as a nucleotide succinate or abasic succinate, which can be the same or different from the cleavable linker used for solid phase synthesis on a solid support. The synthesis can be either solid phase or solution phase, in the example shown, the synthesis is a solid phase synthesis. The synthesis is performed such that a protecting group, such as a dimethoxytrityl group, remains intact on the terminal nucleotide of the tandem oligonucleotide. Upon cleavage and deprotection of the oligonucleotide, the two siNA strands spontaneously hybridize to form a siNA duplex, which allows the purification of the duplex by utilizing the properties of the terminal protecting group, for example by applying a trityl on purification method wherein only duplexes/oligonucleotides with the terminal protecting group are isolated.

[0290] FIG. 2 shows a MALDI-TOF mass spectrum of a purified siNA duplex synthesized by a method of the invention. The two peaks shown correspond to the predicted mass of the separate siNA sequence strands. This result demonstrates that the siNA duplex generated from tandem synthesis can be purified as a single entity using a simple trityl-on purification methodology.

[0291] FIG. 3 shows the results of a stability assay used to determine the serum stability of chemically modified siNA constructs compared to a siNA control consisting of all RNA with 3′-TT termini. T ½ values are shown for duplex stability.

[0292] FIG. 4 shows the results of an RNAi activity screen of several phosphorothioate modified siNA constructs using a luciferase reporter system.

[0293] FIG. 5 shows the results of an RNAi activity screen of several phosphorothioate and universal base modified siNA constructs using a luciferase reporter system.

[0294] FIG. 6 shows the results of an RNAi activity screen of several 2′-O-methyl modified siNA constructs using a luciferase reporter system.

[0295] FIG. 7 shows the results of an RNAi activity screen of several 2′-O-methyl and 2′-deoxy-2′-fluoro modified siNA constructs using a luciferase reporter system.

[0296] FIG. 8 shows the results of an RNAi activity screen of a phosphorothioate modified siNA construct using a luciferase reporter system.

[0297] FIG. 9 shows the results of an RNAi activity screen of an inverted deoxyabasic modified siNA construct generated via tandem synthesis using a luciferase reporter system.

[0298] FIG. 10 shows the results of an RNAi activity screen of chemically modifed siNA constructs including 3′-glyceryl modified siNA constructs compared to an all RNA control siNA construct using a luciferase reporter system. These chemically modified siNAs were compared in the luciferase assay described herein at 1 nM and 10 nM concentration using an all RNA siNA control (siGL2) having 3′-terminal dithymidine (TT) and its corresponding inverted control (Inv siGL2). The background level of luciferase expression in the HeLa cells is designated by the “cells” column. Sense and antisense strands of chemically modified siNA constructs are shown by Sirna/RPI number (sense strand/antisense strand). Sequences corresponding to these Sirna/RPI numbers are shown in Table I.

[0299] FIG. 11 shows the results of an RNAi activity screen of chemically modifed siNA constructs. The screen compared various combinations of sense strand chemical modifications and antisense strand chemical modifications. These chemically modified siNAs were compared in the luciferase assay described herein at 1 nM and 10 nM concentration using an all RNA siNA control (siGL2) having 3′-terminal dithymidine (TT) and its corresponding inverted control (Inv siGL2). The background level of luciferase expression in the HeLa cells is designated by the “cells” column. Sense and antisense strands of chemically modified siNA constructs are shown by Sirna/RPI number (sense strand/antisense strand). Sequences corresponding to these Sirna/RPI numbers are shown in Table I.

[0300] FIG. 12 shows the results of an RNAi activity screen of chemically modifed siNA constructs. The screen compared various combinations of sense strand chemical modifications and antisense strand chemical modifications. These chemically modified siNAs were compared in the luciferase assay described herein at 1 nM and 10 nM concentration using an all RNA siNA control (siGL2) having 3′-terminal dithymidine (TT) and its corresponding inverted control (Inv siGL2). The background level of luciferase expression in the HeLa cells is designated by the “cells” column. Sense and antisense strands of chemically modified siNA constructs are shown by Sirna/RPI number (sense strand/antisense strand). Sequences corresponding to these Sirna/RPI numbers are shown in Table I. In addition, the antisense strand alone (Sirna/RPI 30430) and an inverted control (Sirna/RPI 30227/30229, having matched chemistry to Sirna/RPI (30063/30224) was compared to the siNA duplexes described above.

[0301] FIG. 13 shows the results of an RNAi activity screen of chemically modifed siNA constructs. The screen compared various combinations of sense strand chemical modifications and antisense strand chemical modifications. These chemically modified siNAs were compared in the luciferase assay described herein at 1 nM and 10 nM concentration using an all RNA siNA control (siGL2) having 3′-terminal dithymidine (TT) and its corresponding inverted control (Inv siGL2). The background level of luciferase expression in the HeLa cells is designated by the “cells” column. Sense and antisense strands of chemically modified siNA constructs are shown by Sirna/RPI number (sense strand/antisense strand). Sequences corresponding to these Sirna/RPI numbers are shown in Table I. In addition, an inverted control (Sirna/RPI 30226/30229), having matched chemistry to Sirna/RPI (30222/30224) was compared to the siNA duplexes described above.

[0302] FIG. 14 shows the results of an RNAi activity screen of chemically modifed siNA constructs including various 3′-terminal modified siNA constructs compared to an all RNA control siNA construct using a luciferase reporter system. These chemically modified siNAs were compared in the luciferase assay described herein at 1 nM and 10 nM concentration using an all RNA siNA control (siGL2) having 3′-terminal dithymidine (TT) and its corresponding inverted control (Inv siGL2). The background level of luciferase expression in the HeLa cells is designated by the “cells” column. Sense and antisense strands of chemically modified siNA constructs are shown by Sirna)RPI number (sense strand/antisense strand). Sequences corresponding to these Sirna/RPI numbers are shown in Table I.

[0303] FIG. 15 shows the results of an RNAi activity screen of chemically modifed siNA constructs. The screen compared various combinations of sense strand chemistries compared to a fixed antisense strand chemistry. These chemically modified siNAs were compared in the luciferase assay described herein at 1 nM and 10 nM concentration using an all RNA siNA control (siGL2) having 3′-terminal dithymidine (TT) and its corresponding inverted control (Inv siGL2). The background level of luciferase expression in the HeLa cells is designated by the “cells” column. Sense and antisense strands of chemically modified siNA constructs are shown by Sirna/RPI number (sense strand/antisense strand). Sequences corresponding to these Sirna/RPI numbers are shown in Table I.

[0304] FIG. 16 shows the results of a siNA titration study using a luciferase reporter system, wherein the RNAi activity of a phosphorothioate modified siNA construct is compared to that of a siNA construct consisting of all ribonucleotides except for two terminal thymidine residues.

[0305] FIG. 17 shows a non-limiting proposed mechanistic representation of target RNA degradation involved in RNAi. Double-stranded RNA (dsRNA), which is generated by RNA-dependent RNA polymerase (RdRP) from foreign single-stranded RNA, for example viral, transposon, or other exogenous RNA, activates the DICER enzyme that in turn generates siNA duplexes. Alternately, synthetic or expressed siNA can be introduced directely into a cell by appropriate means. An active siNA complex forms which recognizes a target RNA, resulting in degradation of the target RNA by the RISC endonuclease complex or in the synthesis of additional RNA by RNA-dependent RNA polymerase (RdRP), which can activate DICER and result in additional siNA molecules, thereby amplifying the RNAi response.

[0306] FIG. 18A-F shows non-limiting examples of chemically-modified siNA constructs of the present invention. In the figure, N stands for any nucleotide (adenosine, guanosine, cytosine, uridine, or optionally thymidine, for example thymidine can be substituted in the overhanging regions designated by parenthesis (N N). Various modifications are shown for the sense and antisense strands of the siNA constructs.

[0307] FIG. 18A: The sense strand comprises 21 nucleotides wherein the two terminal 3′-nucleotides are optionally base paired and wherein all nucleotides present are ribonucleotides except for (N N) nucleotides, which can comprise ribonucleotides, deoxynucleotides, universal bases, or other chemical modifications described herein. The antisense strand comprises 21 nucleotides, optionally having a 3′-terminal glyceryl moiety wherein the two terminal 3′-nucleotides are optionally complementary to the target RNA sequence, and wherein all nucleotides present are ribonucleotides except for (N N) nucleotides, which can comprise ribonucleotides, deoxynucleotides, universal bases, or other chemical modifications described herein. A modified intemucleotide linkage, such as a phosphorothioate, phosphorodithioate or other modified intemucleotide linkage as described herein, shown as “s”, optionally connects the (N N) nucleotides in the antisense strand.

[0308] FIG. 18B: The sense strand comprises 21 nucleotides wherein the two terminal 3′-nucleotides are optionally base paired and wherein all pyrimidine nucleotides that may be present are 2′deoxy-2′-fluoro modified nucleotides and all purine nucleotides that may be present are 2′-O-methyl modified nucleotides except for (N N) nucleotides, which can comprise ribonucleotides, deoxynucleotides, universal bases, or other chemical modifications described herein. The antisense strand comprises 21 nucleotides, optionally having a 3′-terminal glyceryl moiety and wherein the two terminal 3′-nucleotides are optionally complementary to the target RNA sequence, and wherein all pyrimidine nucleotides that may be present are 2′-deoxy-2′-fluoro modified nucleotides and all purine nucleotides that may be present are 2′-O-methyl modified nucleotides except for (N N) nucleotides, which can comprise ribonucleotides, deoxynucleotides, universal bases, or other chemical modifications described herein. A modified intemucleotide linkage, such as a phosphorothioate, phosphorodithioate or other modified intemucleotide linkage as described herein, shown as “s”, optionally connects the (N N) nucleotides in the sense and antisense strand.

[0309] FIG. 18C: The sense strand comprises 21 nucleotides having 5′- and 3′-terminal cap moieties wherein the two terminal 3′-nucleotides are optionally base paired and wherein all pyrimidine nucleotides that may be present are 2′-O-methyl or 2′-deoxy-2′-fluoro modified nucleotides except for (N N) nucleotides, which can comprise ribonucleotides, deoxynucleotides, universal bases, or other chemical modifications described herein. The antisense strand comprises 21 nucleotides, optionally having a 3′-terminal glyceryl moiety and wherein the two terminal 3′-nucleotides are optionally complementary to the target RNA sequence, and wherein all pyrimidine nucleotides that may be present are 2′-deoxy-2′-fluoro modified nucleotides except for (N N) nucleotides, which can comprise ribonucleotides, deoxynucleotides, universal bases, or other chemical modifications described herein. A modified intemucleotide linkage, such as a phosphorothioate, phosphorodithioate or other modified internucleotide linkage as described herein, shown as “s”, optionally connects the (N N) nucleotides in the antisense strand.

[0310] FIG. 18D: The sense strand comprises 21 nucleotides having 5′- and 3′-terminal cap moieties wherein the two terminal 3′-nucleotides are optionally base paired and wherein all pyrimidine nucleotides that may be present are 2′-deoxy-2′-fluoro modified nucleotides except for (N N) nucleotides, which can comprise ribonucleotides, deoxynucleotides, universal bases, or other chemical modifications described herein and wherein and all purine nucleotides that may be present are 2′-deoxy nucleotides. The antisense strand comprises 21 nucleotides, optionally having a 3′-terminal glyceryl moiety and wherein the two terminal 3′-nucleotides are optionally complementary to the target RNA sequence, wherein all pyrimidine nucleotides that may be present are 2′-deoxy-2′-fluoro modified nucleotides and all purine nucleotides that may be present are 2′-O-methyl modified nucleotides except for (N N) nucleotides, which can comprise ribonucleotides, deoxynucleotides, universal bases, or other chemical modifications described herein. A modified internucleotide linkage, such as a phosphorothioate, phosphorodithioate or other modified internucleotide linkage as described herein, shown as “s”, optionally connects the (N N) nucleotides in the antisense strand.

[0311] FIG. 18E: The sense strand comprises 21 nucleotides having 5′- and 3′-terminal cap moieties wherein the two terminal 3′-nucleotides are optionally base paired and wherein all pyrimidine nucleotides that may be present are 2′-deoxy-2′-fluoro modified nucleotides except for (N N) nucleotides, which can comprise ribonucleotides, deoxynucleotides, universal bases, or other chemical modifications described herein. The antisense strand comprises 21 nucleotides, optionally having a 3′-terminal glyceryl moiety and wherein the two terminal 3′-nucleotides are optionally complementary to the target RNA sequence, and wherein all pyrimidine nucleotides that may be present are 2′-deoxy-2′-fluoro modified nucleotides and all purine nucleotides that may be present are 2′-O-methyl modified nucleotides except for (N N) nucleotides, which can comprise ribonucleotides, deoxynucleotides, universal bases, or other chemical modifications described herein. A modified internucleotide linkage, such as a phosphorothioate, phosphorodithioate or other modified intemucleotide linkage as described herein, shown as “s”, optionally connects the (N N) nucleotides in the antisense strand.

[0312] FIG. 18F: The sense strand comprises 21 nucleotides having 5′- and 3′-terminal cap moieties wherein the two terminal 3′-nucleotides are optionally base paired and wherein all pyrimidine nucleotides that may be present are 2′-deoxy-2′-fluoro modified nucleotides except for (N N) nucleotides, which can comprise ribonucleotides, deoxynucleotides, universal bases, or other chemical modifications described herein and wherein and all purine nucleotides that may be present are 2′-deoxy nucleotides. The antisense strand comprises 21 nucleotides, optionally having a 3′-terminal glyceryl moiety and wherein the two terminal 3′-nucleotides are optionally complementary to the target RNA sequence, and having one 3′-terminal phosphorothioate internucleotide linkage and wherein all pyrimidine nucleotides that may be present are 2′-deoxy-2′-fluoro modified nucleotides and all purine nucleotides that may be present are 2′-deoxy nucleotides except for (N N) nucleotides, which can comprise ribonucleotides, deoxynucleotides, universal bases, or other chemical modifications described herein. A modified internucleotide linkage, such as a phosphorothioate, phosphorodithioate or other modified intemucleotide linkage as described herein, shown as “s”, optionally connects the (N N) nucleotides in the antisense strand. The antisense strand of constructs A-F comprise sequence complementary to any target nucleic acid sequence of the invention. Furthermore, when a glyceryl moiety (L) is present at the 3′-end of the antisense strand for any construct shown in FIG. 4 A-F, the modified internucleotide linkage is optional.

[0313] FIG. 19 shows non-limiting examples of specific chemically modified siNA sequences of the invention. A-F applies the chemical modifications described in FIG. 18A-F to a representative siNA sequence targeting the hepatitis C virus (HCV). However, such chemical modifications can be applied to any target sequence contemplated by the instant invention (see for example target sequences referred to by accession number in McSwiggen et al., International PCT publication No. WO 03/74654.

[0314] FIG. 20 shows non-limiting examples of different siNA constructs of the invention. The examples shown (constructs 1, 2, and 3) have 19 representative base pairs; however, different embodiments of the invention include any number of base pairs described herein. Bracketed regions represent nucleotide overhangs, for example comprising about 1, 2, 3, or 4 nucleotides in length when present, preferably about 2 nucleotides. Such overhangs can be present or absent (i.e., blunt ends). Such blunt ends can be present on one end or both ends of the siNA molecule, for example where all nucleotides present in a siNA duplex are base paired. Constructs 1 and 2 can be used independently for RNAi activity. Construct 2 can comprise a polynucleotide or non-nucleotide linker, which can optionally be designed as a biodegradable linker. In one embodiment, the loop structure shown in construct 2 can comprise a biodegradable linker that results in the formation of construct 1 in vivo and/or in vitro. In another example, construct 3 can be used to generate construct 2 under the same principle wherein a linker is used to generate the active siNA construct 2 in vivo and/or in vitro, which can optionally utilize another biodegradable linker to generate the active siNA construct 1 in vivo and/or in vitro. As such, the stability and/or activity of the siNA constructs can be modulated based on the design of the siNA construct for use in vivo or in vitro and/or in vitro.

[0315] FIG. 21 is a diagrammatic representation of a method used to determine target sites for siNA mediated RNAi within a particular target nucleic acid sequence, such as messenger RNA. (A) A pool of siNA oligonucleotides are synthesized wherein the antisense region of the siNA constructs has complementarity to target sites across the target nucleic acid sequence, and wherein the sense region comprises sequence complementary to the antisense region of the siNA. (B) The sequences are transfected into cells. (C) Cells are selected based on phenotypic change that is associated with modulation of the target nucleic acid sequence. (D) The siNA is isolated from the selected cells and is sequenced to identify efficacious target sites within the target nucleic acid sequence.

[0316] FIG. 22 shows non-limiting examples of different stabilization chemistries (1-10) that can be used, for example, to stabilize the 3′-end of siNA sequences of the invention, including (1) [3-3′]-inverted deoxyribose; (2) deoxyribonucleotide; (3) [5′-3′]-3′-deoxyribonucleotide; (4) [5′-3′]-ribonucleotide; (5) [5′-3′]-3′-O-methyl ribonucleotide; (6) 3′-glyceryl; (7) [3′-5′]-3′-deoxyribonucleotide; (8) [3′-3′]-deoxyribonucleotide; (9) [5′-2′]-deoxyribonucleotide; and (10) [5-3′]-dideoxyribonucleotide. In addition to modified and unmodified backbone chemistries indicated in the figure, these chemistries can be combined with different backbone modifications as described herein, for example, backbone modifications having Formula I. In addition, the 2′-deoxy nucleotide shown 5′ to the terminal modifications shown can be another modified or unmodified nucleotide or non-nucleotide described herein, for example modifications having any of Formulae I-VII or any combination thereof.

[0317] FIG. 23 shows a non-limiting example of siNA mediated inhibition of VEGF-induced angiogenesis using the rat corneal model of angiogenesis. siNA targeting site 2340 of VEGFR1 RNA (shown as Sirna/RPI No. 29695/29699) were compared to inverted controls (shown as Sirna/RPI No. 29983/29984) at three different concentrations and compared to a VEGF control in which no siNA was administered.

[0318] FIG. 24 is a non-limiting example of a HBsAg screen of stabilized siNA constructs (“stab 4/5”, see Table IV) targeting HBV pregenomic RNA in HepG2 cells at 25 nM compared to untreated and matched chemistry inverted sequence controls. The siNA sense and antisense strands are shown by Sirna/RPI number (sense/antisense).

[0319] FIG. 25 is a non-limiting example of a dose response HBsAg screen of stabilized siNA constructs (“stab 4/5”, see Table IV) targeting sites 262 and 1580 of the HBV pregenomic RNA in HepG2 cells at 0.5, 5, 10 and 25 nM compared to untreated and matched chemistry inverted sequence controls. The siNA sense and antisense strands are shown by Sirna/RPI number (sense/antisense).

[0320] FIG. 26 shows a dose response comparison of two different stabilization chemistries (“stab 7/8” and “stab 7/11”, see Table IV) targeting site 1580 of the HBV pregenomic RNA in HepG2 cells at 5, 10, 25, 50 and 100 nM compared to untreated and matched chemistry inverted sequence controls. The siNA sense and antisense strands are shown by Sirna/RPI number (sense/antisense).

[0321] FIG. 27 shows a non-limiting example of a strategy used to identify chemically modified siNA constructs of the invention that are nuclease resistance while preserving the ability to mediate RNAi activity. Chemical modifications are introduced into the siNA construct based on educated design parameters (e.g., introducing 2′-modifications, base modifications, backbone modifications, terminal cap modifications etc). The modified construct in tested in an appropriate system (e.g human serum for nuclease resistance, shown, or an animal model for PK/delivery parameters). In parallel, the siNA construct is tested for RNAi activity, for example in a cell culture system such as a luciferase reporter assay). Lead siNA constructs are then identified which possess a particular characteristic while maintaining RNAi activity, and can be further modified and assayed once again. This same approach can be used to identify siNA-conjugate molecules with improved pharmacokinetic profiles, delivery, and RNAi activity.

[0322] FIG. 28 shows representative data of a chemically modified siNA construct (Stab 4/5, Table IV) targeting HBV site 1580 RNA compared to an unstabilized siRNA construct in a dose response time course HBsAg assay. The constructs were compared at different concentrations (5 nM, 10 nM, 25 nM, 50 nM, and 100 nM) over the course of nine days. Activity based on HBsAg levels was determined at day 3, day 6, and day 9.

[0323] FIG. 29 shows representative data of a chemically modified siNA construct (Stab 7/8, Table IV) targeting HBV site 1580 RNA compared to an unstabilized siRNA construct in a dose response time course HBsAg assay. The constructs were compared at different concentrations (5 nM, 10 nM, 25 nM, 50 nM, and 100 nM) over the course of nine days. SiNA activity based on HBsAg levels was determined at day 3, day 6, and day 9.

[0324] FIG. 30 shows representative data of a chemically modified siNA construct (Stab 7/11, Table IV) targeting HBV site 1580 RNA compared to an unstabilized siRNA construct in a dose response time course HBsAg assay. The constructs were compared at different concentrations (5 nM, 10 nM, 25 nM, 50 nM, and 100 nM) over the course of nine days. SiNA activity based on HBsAg levels was determined at day 3, day 6, and day 9.

[0325] FIG. 31 shows representative data of a chemically modified siNA construct (Stab 9/10, Table IV) targeting HBV site 1580 RNA compared to an unstabilized siRNA construct in a dose response time course HBsAg assay. The constructs were compared at different concentrations (5 nM, 10 nM, 25 nM, 50 nM, and 100 nM) over the course of nine days. SiNA activity based on HBsAg levels was determined at day 3, day 6, and day 9.

[0326] FIG. 32 shows non-limiting examples of inhibition of viral replication of a HCV/poliovirus chimera by siNA constructs targeted to HCV chimera (29579/29586; 29578/29585) compared to control (29593/29600).

[0327] FIG. 33 shows a non-limiting example of a dose response study demonstrating the inhibition of viral replication of a HCV/poliovirus chimera by siNA construct (29579/29586) at various concentrations (1 nM, 5 nM, 10 nM, and 25 nM) compared to control (29593/29600).

[0328] FIG. 34 shows a non-limiting example demonstrating the inhibition of viral replication of a HCV/poliovirus chimera by a chemically modified siRNA construct (30051/30053) compared to control construct (30052/30054).

[0329] FIG. 35 shows a non-limiting example demonstrating the inhibition of viral replication of a HCV/poliovirus chimera by a chemically modified siRNA construct (30055/30057) compared to control construct (30056/30058).

[0330] FIG. 36 shows a non-limiting example of several chemically modified siRNA constructs targeting viral replication of an HCV/poliovirus chimera at 10 nM treatment in comparison to a lipid control and an inverse siNA control construct 29593/29600.

[0331] FIG. 37 shows a non-limiting example of several chemically modified siRNA constructs targeting viral replication of a HCV/poliovirus chimera at 25 nM treatment in comparison to a lipid control and an inverse siNA control construct 29593/29600.

[0332] FIG. 38 shows a non-limiting example of several chemically modified siRNA constructs targeting viral replication of a Huh7 HCV replicon system at 25 nM treatment in comparison to untreated cells (“cells”), cells transfected with lipofectamine (“LFA2K”) and inverse siNA control constructs.

[0333] FIG. 39 shows a non-limiting example of a dose response study using chemically modified siNA molecules (Stab 4/5, see Table IV) targeting HCV RNA sites 291, 300, and 303 in a Huh7 HCV replicon system at 5, 10, 25, and 100 nM treatment comparison to untreated cells (“cells”), cells transfected with lipofectamine (“LFA”) and inverse siNA control constructs.

[0334] FIG. 40 shows a non-limiting example of several chemically modified siNA constructs (Stab 7/8, see Table IV) targeting viral replication in a Huh7 HCV replicon system at 25 nM treatment in comparison to untreated cells (“cells”), cells transfected with lipofectamine (“Lipid”) and inverse siNA control constructs.

[0335] FIG. 41 shows a non-limiting example of a dose response study using chemically modified siNA molecules (Stab 7/8, see Table IV) targeting HCV site 327 in a Huh7 HCV replicon system at 5, 10, 25, 50, and 100 nM treatment in comparison to inverse siNA control constructs.

[0336] FIG. 42 shows a synthetic scheme for post-synthetic modification of a nucleic acid molecule to produce a folate conjugate.

[0337] FIG. 43 shows a synthetic scheme for generating an oligonucleotide or nucleic acid-folate conjugate.

[0338] FIG. 44 shows an alternative synthetic scheme for generating an oligonucleotide or nucleic acid-folate conjugate.

[0339] FIG. 45 shows an alternative synthetic scheme for post-synthetic modification of a nucleic acid molecule to produce a folate conjugate.

[0340] FIG. 46 shows a non-limiting example of a synthetic scheme for the synthesis of a N-acetyl-D-galactosamine-2′-aminouridine phosphoramidite conjugate of the invention.

[0341] FIG. 47 shows a non-limiting example of a synthetic scheme for the synthesis of a N-acetyl-D-galactosamine-D-threoninol phosphoramidite conjugate of the invention.

[0342] FIG. 48 shows a non-limiting example of a N-acetyl-D-galactosamine siNA nucleic acid conjugate of the invention. W shown in the example refers to a biodegradable linker, for example a nucleic acid dimer, trimer, or tetramer comprising ribonucleotides and/or deoxyribonucleotides. The siNA can be conjugated at the 3′, 5′ or both 3′ and 5′ ends of the sense strand of a double stranded siNA and/or the 3′-end of the antisense strand of the siNA. A single stranded siNA molecule can be conjugated at the 3′-end of the siNA.

[0343] FIG. 49 shows a non-limiting example of a synthetic scheme for the synthesis of a dodecanoic acid derived conjugate linker of the invention.

[0344] FIG. 50 shows a non-limiting example of a synthetic scheme for the synthesis of an oxime linked nucleic acid/peptide conjugate of the invention.

[0345] FIG. 51 shows non-limiting examples of phospholipid derived siNA conjugates of the invention. CL shown in the examples refers to a biodegradable linker, for example a nucleic acid dimer, trimer, or tetramer comprising ribonucleotides and/or deoxyribonucleotides. The siNA can be conjugated at the 3′, 5′ or both 3′ and 5′ ends of the sense strand of a double stranded siNA and/or the 3′-end of the antisense strand of the siNA. A single stranded siNA molecule can be conjugated at the 3′-end of the siNA.

[0346] FIG. 52 shows a non-limiting example of a synthetic scheme for preparing a phospholipid derived siNA conjugates of the invention.

[0347] FIG. 53 shows a non-limiting example of a synthetic scheme for preparing a poly-N-acetyl-D-galactosamine nucleic acid conjugate of the invention.

[0348] FIG. 54 shows a non-limiting example of the synthesis of siNA cholesterol conjugates of the invention using a phosphoramidite approach.

[0349] FIG. 55 shows a non-limiting example of the synthesis of siNA PEG conjugates of the invention using NHS ester coupling.

[0350] FIG. 56 shows a non-limiting example of the synthesis of siNA cholesterol conjugates of the invention using NHS ester coupling.

[0351] FIG. 57 shows a non-limiting example of various siNA cholesterol conjugates of the invention.

[0352] FIG. 58 shows a non-limiting example of various siNA cholesterol conjugates of the invention in which various linker chemistries and/or cleavable linkers can be utilized at different positions of a double stranded siNA molecule.

[0353] FIG. 59 shows a non-limiting example of various siNA cholesterol conjugates of the invention in which various linker chemistries and/or cleavable linkers can be utilized at different positions of a double stranded siNA molecule.

[0354] FIG. 60 shows a non-limiting example of various siNA cholesterol conjugates of the invention in which various linker chemistries and/or cleavable linkers can be utilized at different positions of a single stranded siNA molecule.

[0355] FIG. 61 shows a non-limiting example of various siNA phospholipid conjugates of the invention in which various linker chemistries and/or cleavable linkers can be utilized at different positions of a double stranded siNA molecule.

[0356] FIG. 62 shows a non-limiting example of various siNA phospholipid conjugates of the invention in which various linker chemistries and/or cleavable linkers can be utilized at different positions of a single stranded siNA molecule.

[0357] FIG. 63 shows a non-limiting example of various siNA galactosamine conjugates of the invention in which various linker chemistries and/or cleavable linkers can be utilized at different positions of a double stranded siNA molecule.

[0358] FIG. 64 shows a non-limiting example of various siNA galactosamine conjugates of the invention in which various linker chemistries and/or cleavable linkers can be utilized at different positions of a single stranded siNA molecule.

[0359] FIG. 65 shows a non-limiting example of various generalized siNA conjugates of the invention in which various linker chemistries and/or cleavable linkers can be utilized at different positions of a double stranded siNA molecule. CONJ in the figure refers to any biologically active compound or any other conjugate compound as described herein and in the Formulae herein.

[0360] FIG. 66 shows a non-limiting example of various generalized siNA conjugates of the invention in which various linker chemistries and/or cleavable linkers can be utilized at different positions of a single stranded siNA molecule. CONJ in the figure refers to any biologically active compound or any other conjugate compound as described herein and in the Formulae herein.

[0361] FIG. 67 shows a non-limiting example of the pharmacokinetic distribution of intact siNA in liver after administration of conjugated or unconjugated siNA molecules in mice.

[0362] FIG. 68 shows a non-limiting example of the activity of conjugated siNA constructs compared to matched chemistry unconjugated siNA constructs in a HBV cell culture system without the use of transfection lipid. As shown in the Figure, siNA conjugates provide efficacy in cell culture without the need for transfection reagent.

[0363] FIG. 69 shows a non-limiting example of a scheme for the synthesis of a mono-galactosamine phosphoramidite of the invention that can be used to generate galactosamine conjugated nucleic acid molecules.

[0364] FIG. 70 shows a non-limiting example of a scheme for the synthesis of a tri-galactosamine phosphoramidite of the invention that can be used to generate tri-galactosamine conjugated nucleic acid molecules.

[0365] FIG. 71 shows a non-limiting example of a scheme for the synthesis of another tri-galactosamine phosphoramidite of the invention that can be used to generate tri-galactosamine conjugated nucleic acid molecules.

[0366] FIG. 72 shows a non-limiting example of an alternate scheme for the synthesis of a tri-galactosamine phosphoramidite of the invention that can be used to generate tri-galactosamine conjugated nucleic acid molecules.

[0367] FIG. 73 shows a non-limiting example of a scheme for the synthesis of a cholesterol NHS ester of the invention that can be used to generate cholesterol conjugated nucleic acid, molecules.

[0368] FIG. 74 shows non-limiting exampled of phosphorylated siNA molecules of the invention, including linear and duplex constructs and asymmetric derivatives thereof.

[0369] FIG. 75 shows non-limiting examples of a chemically modified terminal phosphate groups of the invention.

[0370] FIG. 76 shows a non-limiting example of inhibition of VEGF induced neovascularization in the rat corneal model. VEGFr1 site 349 active siNA having “Stab 9/10” chemistry (Sirna #31270/31273) was tested for inhibition of VEGF-induced angiogenesis at three different concentrations (2.0 ug, 1.0 ug, and 0.1 μg dose response) as compared to a matched chemistry inverted control siNA construct (Sirna #31276/31279) at each concentration and a VEGF control in which no siNA was administered. As shown in the figure, the active siNA construct having “Stab 9/10” chemistry (Sirna #31270/31273) is highly effective in inhibiting VEGF-induced angiogenesis in the rat corneal model compared to the matched chemistry inverted control siNA at concentrations from 0.1 μg to 2.0 ug.

[0371] FIG. 77 shows activity of modified siNA constructs having stab 4/5 (Sirna 30355/30366), stab 7/8 (Sirna 30612/30620), and stab 7/11 (Sirna 30612/31175) chemistries and an all ribo siNA construct (Sirna 30287/30298) in the reduction of HBsAg levels compared to matched inverted controls at A. 3 days, B. 9 days, and C. 21 days post transfection. Also shown is the corresponding percent inhibition as function of time at siNA concentrations of D. 100 nM, E. 50 nM, and F. 25 nM.

[0372] FIG. 78 shows non-limiting examples of phosphorylated siNA molecules of the invention, including linear and duplex constructs and asymmetric derivatives thereof.

[0373] FIG. 79 shows non-limiting examples of chemically modified terminal phosphate groups of the invention.

[0374] FIG. 80 shows a non-limiting example of reduction of serum HBV DNA in mice treated with hydrodynamically administered chemically modified siNA (Stab 7/8 and Stab 9/10) targeting HBV RNA compared to matched chemistry inverted controls and a saline control.

[0375] FIG. 81 shows a non-limiting example of reduction of serum HBV S antigen (HBsAg) in mice treated with hydrodynamically administered chemically modified siNA (Stab 7/8 and Stab 9/10) targeting HBV RNA compared to matched chemistry inverted controls and a saline control.

[0376] FIG. 82 shows a non-limiting example of reduction of serum HBV RNA in mice treated with hydrodynamically administered chemically modified siNA (Stab 7/8 and Stab 9/10) targeting HBV RNA compared to matched chemistry inverted controls and a saline control.

[0377] FIG. 83 shows a non-limiting example of reduction of serum HBV DNA in mice treated with hydrodynamically administered chemically modified siNA (Stab 7/8 and Stab 9/10) targeting HBV RNA at 5 days and 7 days post administration.

[0378] FIG. 84 shows a non-limiting example of an assay for dose dependent reduction of Luciferase expression utilizing Stab 7/8 chemically modified siNA constructs targeting luciferase RNA sites 80, 237, and 1478 that were selected from a screen using all Stab 7/8 chemically modified siNA constructs.

[0379] FIG. 85 shows a non-limiting example of an assay for dose dependent reduction of Luciferase expression utilizing Stab 7/8 chemically modified siNA constructs targeting luciferase RNA sites 1544 and 1607 that were selected from a screen using all Stab 7/8 chemically modified siNA constructs.

[0380] FIG. 86 shows a non-limiting example of an assay screen of Stab 7/8 siNA constructs targeting various sites of HCV RNA in a replicon system compared to untreated, lipid, and an inverted control. As shown in the figure, several Stab 7/8 constructs were identified with potent anti-HCV activity as shown by reduction in HCV RNA levels.

[0381] FIG. 87 shows a non-limiting example of an assay screen of Stab 7/8 siNA constructs targeting various sites of HBV RNA in HEpG2 cells compared to untreated cells and an inverted control. As shown in the figure, several Stab 7/8 constructs were identified with potent anti-HBV activity as shown by reduction in HBV S antigen levels.

[0382] FIG. 88 shows a non-limiting example of an assay screen of various combinations of chemically modified siNA constructs (e.g., Stab 7/8, 7/10, 7/11, 9/8, and 9/10) targeting site 1580 of HBV RNA in HEpG2 cells compared to untreated cells and an matched chemistry inverted controls. As shown in the figure, the combination chemistries tested demonstrated potent anti-HBV activity as shown by reduction in HBV S antigen levels.

[0383] FIG. 89 shows a non-limiting example of an assay screen of various combinations of chemically modified siNA constructs (e.g., Stab 7/8, 9/10, 6/10, 16/8, 16/10, 18/8, and 18/10) targeting site 1580 of HEY RNA in HEpG2 cells compared to untreated cells and an matched chemistry inverted controls. As shown in the figure, the combination chemistries tested demonstrated potent anti-HBV activity as shown by reduction in HBV S antigen levels.

[0384] FIG. 90 shows a non-limiting example of an assay screen of various combinations of chemically modified siNA constructs (e.g., Stab 4/8, 4/10, 7/5, 7/10, 9/5, 9/8, and 9/11) targeting site 1580 of HBV RNA in HEpG2 cells compared to untreated cells and an matched chemistry inverted controls. As shown in the figure, the combination chemistries tested demonstrated potent anti-HBV activity as shown by reduction in HBV S antigen levels.

[0385] FIG. 91 shows a non-limiting example of reduction of serum HBV DNA in mice treated with hydrodynamically administered polyethylimine-polyethyleneglycol-tri-N-acetylgalactosamine (PEI-PEG-triGAL) formulated Stab 9/10 siNA targeting HBV site 1580 RNA compared to a matched chemistry inverted control.

[0386] FIG. 92 shows a non-limiting example of reduction of serum HBsAg in mice treated with hydrodynamically administered polyethylimine-polyethyleneglycol-tri-N-acetylgalactosamine (PEI-PEG-triGAL) formulated Stab 9/10 siNA targeting HBV site 1580 RNA compared to a matched chemistry inverted control.

[0387] FIG. 93 shows a non-limiting example of the general structure of a polyethylimine-polyethyleneglycol-tri-N-acetylgalactosamine (PEI-PEG-triGAL) transfection agent.

[0388] FIG. 94A shows a non-limiting example of methodology used to design self complementary DFO constructs utilizing palindrome and/or repeat nucleic acid sequences that are identified in a target nucleic acid sequence. (i) A palindrome or repeat sequence is identified in a nucleic acid target sequence. (ii) A sequence is designed that is complementary to the target nucleic acid sequence and the palindrome sequence. (iii) An inverse repeat sequence of the nonpalindrome/repeat portion of the complementary sequence is appended to the 3′-end of the complementary sequence to generate a self complementary DFO molecule comprising sequence complementary to the nucleic acid target. (iv) The DFO molecule can self-assemble to form a double stranded oligonucleotide. FIG. 94B shows a non-limiting representative example of a duplex forming oligonucleotide sequence (SEQ ID NO: 1156). FIG. 94C shows a nonlimiting example of the self assembly schematic of a representative duplex forming oligonucleotide sequence (SEQ ID NO: 1157). FIG. 94D shows a non-limiting example of the self assembly schematic of a representative duplex forming oligonucleotide sequence (SEQ ID NO: 1156) followed by interaction with a target nucleic acid sequence (SEQ ID NO: 1154) resulting in modulation of gene expression.

[0389] FIG. 95 shows a non-limiting example of the design of self complementary DFO constructs utilizing palidrome and/or repeat nucleic acid sequences that are incorporated into the DFO constructs that have sequence complementary to any target nucleic acid sequence of interest. Incorporation of these palindrome/repeat sequences allow the design of DFO constructs that form duplexes in which each strand is capable of mediating modulation of target gene expression, for example by RNAi. First, the target sequence is identified. A complementary sequence is then generated in which nucleotide or non-nucleotide modifications (shown as X or Y) are introduced into the complementary sequence that generate an artificial palindrome (shown as XYXYXY in the Figure). An inverse repeat of the non-palindrome/repeat complementary sequence is appended to the 3′-end of the complementary sequence to generate a self complementary DFO comprising sequence complementary to the nucleic acid target. The DFO can self-assemble to form a double stranded oligonucleotide.

[0390] FIG. 96 shows non-limiting examples of multifunctional siNA molecules of the invention comprising two separate polynucleotide sequences that are each capable of mediating RNAi directed cleavage of differing target nucleic acid sequences. FIG. 96A shows a non-limiting example of a multifunctional siNA molecule having a first region that is complementary to a first target nucleic acid sequence (complementary region 1) and a second region that is complementary to a second target nucleic acid sequence (complementary region 2), wherein the first and second complementary regions are situated at the 3′-ends of each polynucleotide sequence in the multifunctional siNA. The dashed portions of each polynucleotide sequence of the multifunctional siNA construct have complementarity with regard to corresponding portions of the siNA duplex, but do not have complementarity to the target nucleic acid sequences. FIG. 96B shows a non-limiting example of a multifunctional siNA molecule having a first region that is complementary to a first target nucleic acid sequence (complementary region 1) and a second region that is complementary to a second target nucleic acid sequence (complementary region 2), wherein the first and second complementary regions are situated at the 5′-ends of each polynucleotide sequence in the multifunctional siNA. The dashed portions of each polynucleotide sequence of the multifunctional siNA construct have complementarity with regard to corresponding portions of the siNA duplex, but do not have complementarity to the target nucleic acid sequences.

[0391] FIG. 97 shows non-limiting examples of multifunctional siNA molecules of the invention comprising a single polynucleotide sequence comprising distinct regions that are each capable of mediating RNAi directed cleavage of differing target nucleic acid sequences. FIG. 97A shows a non-limiting example of a multifunctional siNA molecule having a first region that is complementary to a first target nucleic acid sequence (complementary region 1) and a second region that is complementary to a second target nucleic acid sequence (complementary region 2), wherein the second complementary region is situated at the 3′-end of the polynucleotide sequence in the multifunctional siNA. The dashed portions of each polynucleotide sequence of the multifunctional siNA construct have complementarity with regard to corresponding portions of the siNA duplex, but do not have complementarity to the target nucleic acid sequences. FIG. 97B shows a non-limiting example of a multifunctional siNA molecule having a first region that is complementary to a first target nucleic acid sequence (complementary region 1) and a second region that is complementary to a second target nucleic acid sequence (complementary region 2), wherein the first complementary region is situated at the 5′-end of the polynucleotide sequence in the multifunctional siNA. The dashed portions of each polynucleotide sequence of the multifunctional siNA construct have complementarity with regard to corresponding portions of the siNA duplex, but do not have complementarity to the target nucleic acid sequences. In one embodiment, these multifunctional siNA constructs are processed in vivo or in vitro to generate multifunctional siNA constructs as shown in FIG. 96.

[0392] FIG. 98 shows non-limiting examples of multifunctional siNA molecules of the invention comprising two separate polynucleotide sequences that are each capable of mediating RNAi directed cleavage of differing target nucleic acid sequences and wherein the multifunctional siNA construct further comprises a self complementary, palindrome, or repeat region, thus enabling shorter bifunctional siNA constructs that can mediate RNA interference against differing target nucleic acid sequences. FIG. 98A shows a non-limiting example of a multifunctional siNA molecule having a first region that is complementary to a first target nucleic acid sequence (complementary region 1) and a second region that is complementary to a second target nucleic acid sequence (complementary region 2), wherein the first and second complementary regions are situated at the 3′-ends of each polynucleotide sequence in the multifunctional siNA, and wherein the first and second complementary regions further comprise a self complementary, palindrome, or repeat region. The dashed portions of each polynucleotide sequence of the multifunctional siNA construct have complementarity with regard to corresponding portions of the siNA duplex, but do not have complementarity to the target nucleic acid sequences. FIG. 98B shows a non-limiting example of a multifunctional siNA molecule having a first region that is complementary to a first target nucleic acid sequence (complementary region 1) and a second region that is complementary to a second target nucleic acid sequence (complementary region 2), wherein the first and second complementary regions are situated at the 5′-ends of each polynucleotide sequence in the multifunctional siNA, and wherein the first and second complementary regions further comprise a self complementary, palindrome, or repeat region. The dashed portions of each polynucleotide sequence of the multifunctional siNA construct have complementarity with regard to corresponding portions of the siNA duplex, but do not have complementarity to the target nucleic acid sequences.

[0393] FIG. 99 shows non-limiting examples of multifunctional siNA molecules of the invention comprising a single polynucleotide sequence comprising distinct regions that are each capable of mediating RNAi directed cleavage of differing target nucleic acid sequences and wherein the multifunctional siNA construct further comprises a self complementary, palindrome, or repeat region, thus enabling shorter bifunctional siNA constructs that can mediate RNA interference against differing target nucleic acid sequences. FIG. 99A shows a non-limiting example of a multifunctional siNA molecule having a first region that is complementary to a first target nucleic acid sequence (complementary region 1) and a second region that is complementary to a second target nucleic acid sequence (complementary region 2), wherein the second complementary region is situated at the 3′-end of the polynucleotide sequence in the multifunctional siNA, and wherein the first and second complementary regions further comprise a self complementary, palindrome, or repeat region. The dashed portions of each polynucleotide sequence of the multifunctional siNA construct have complementarity with regard to corresponding portions of the siNA duplex, but do not have complementarity to the target nucleic acid sequences. FIG. 99B shows a non-limiting example of a multifunctional siNA molecule having a first region that is complementary to a first target nucleic acid sequence (complementary region 1) and a second region that is complementary to a second target nucleic acid sequence (complementary region 2), wherein the first complementary region is situated at the 5′-end of the polynucleotide sequence in the multifunctional siNA, and wherein the first and second complementary regions further comprise a self complementary, palindrome, or repeat region. The dashed portions of each polynucleotide sequence of the multifunctional siNA construct have complementarity with regard to corresponding portions of the siNA duplex, but do not have complementarity to the target nucleic acid sequences. In one embodiment, these multifunctional siNA constructs are processed in vivo or in vitro to generate multifunctional siNA constructs as shown in FIG. 98.

[0394] FIG. 100 shows a non-limiting example of how multifunctional siNA molecules of the invention can target two separate target nucleic acid molecules, such as separate RNA molecules encoding differing proteins, for example a cytokine and its corresponding receptor, differing viral strains, a virus and a cellular protein involved in viral infection or replication, or differing proteins involved in a common or divergent biologic pathway that is implicated in the maintenance of progression of disease. Each strand of the multifunctional siNA construct comprises a region having complementarity to separate target nucleic acid molecules. The multifunctional siNA molecule is designed such that each strand of the siNA can be utilized by the RISC complex to initiate RNA interference mediated cleavage of its corresponding target. These design parameters can include destabilization of each end of the siNA construct (see for example Schwarz et al., 2003, Cell, 115, 199-208). Such destabilization can be accomplished for example by using guanosine-cytidine base pairs, alternate base pairs (e.g., wobbles), or destabilizing chemically modified nucleotides at terminal nucleotide positions as is known in the art.

[0395] FIG. 101 shows a non-limiting example of how multifunctional siNA molecules of the invention can target two separate target nucleic acid sequences within the same target nucleic acid molecule, such as alternate coding regions of a RNA, coding and non-coding regions of a RNA, or alternate splice variant regions of a RNA. Each strand of the multifunctional siNA construct comprises a region having complementarity to the separate regions of the target nucleic acid molecule: The multifunctional siNA molecule is designed such that each strand of the siNA can be utilized by the RISC complex to initiate RNA interference mediated cleavage of its corresponding target region. These design parameters can include destabilization of each end of the siNA construct (see for example Schwarz et al., 2003, Cell, 115, 199-208). Such destabilization can be accomplished for example by using guanosine-cytidine base pairs, alternate base pairs (e.g., wobbles), or destabilizing chemically modified nucleotides at terminal nucleotide positions as is known in the art.

[0396] FIG. 102 shows a non-limiting example of the dose dependent reduction in serum HBV DNA levels following systemic intravenous administration of a Stab 7/8 siNA construct targeting HBV RNA site 263 in mice pre-treated with a HBV expressing vector via hydrodynamic injection. siNA treated groups were compared to inverted control or saline groups. A statistically significant (P<0.01) reduction of 0.93 log was observed in the 30 mg/kg group as compared to the saline group. This result demonstrates in vivo activity of a systemically administered siNA.

[0397] FIG. 103 shows activity of a fully stabilized siNA construct compared to a matched chemistry inverted control, an all RNA siNA construct having identical sequence (RNA active), and a corresponding all RNA inverted control (RNA Inv), in a HBV Co-HDI mouse model. A hydrodynamic tail vein injection (HDI) containing 1 ug of the pWTD HBV vector and 0, 0.03, 0.1, 0.3 or 1.0 ug of siNA was performed on C57BL/J6 mice. Active siNA duplexes and inverted sequence controls in both native RNA and stabilized chemistry were tested. The levels of serum HBV DNA and HBsAg were measured 72 hrs post injection. FIG. 103A shows results for HBV serum DNA levels, FIG. 103B shows results for serum HBsAg levels, and FIG. 103C shows results for liver HBV RNA levels in this study.

[0398] FIG. 104 shows non-limiting examples of the design of self complementary DFO constructs utilizing palidrome and/or repeat nucleic acid sequences that are incorporated into the DFO constructs that have sequence complementary to any target nucleic acid sequence of interest as described in FIG. 95. The palidrome/repeat sequence comprises chemically modified nucleotides that are able to interact with a portion of the target nucleic acid sequence (e.g., use of modified base analogs that can form Watson Crick base pairs or non-Watson Crick base pairs such as 2-aminopurine or 2-amino-1,6-dihydropurine nucleotides or universal nucleotides).

[0399] FIG. 105 shows non-limiting examples of inhibition of VEGFR1 RNA expression using DFO molecules of the invention. Duplex DFO constructs prepared from compound numbers 32808, 32809, 32810, 32811, and 32812 were assayed along with siNA molecules having known activity against VEGFR1 RNA (compound numbers 32748/32755, 33282/32289, 31270/31273), matched chemistry inverted controls (compound numbers 32772/32779, 32296/32303, 31276/31279), and a transfection agent control (LF2K). As shown in the Figure, the self complementary DFO sequence 32812 shows potent inhibition of VEGFR1 RNA. Sequences for compound numbers are shown in Table I.

[0400] FIG. 106 shows non-limiting examples of inhibition of HBV RNA expression using DFO molecules of the invention as assayed by HBsAg levels. A duplex DFO construct prepared from compound 32221 and a hairpin formed with the same sequence (32221 fold) was assayed along with a siNA construct having known activity against HBV RNA (compound number 31335/31337), a matched chemistry inverted control (compound number 31336/31338), and untreated cells (Untreated). As shown in the Figure, the self complementary DFO sequence 32221 shows significant inhibition of HBV HBsAg as a duplex. Sequences for compound numbers are shown in Table I.

[0401] FIG. 107 shows a non-limiting example of the results obtained from using a method to determine the probability of the occurrence of various palindromes ranging from 6 nucleotides to 14 nucleotides in an artificially generated 200K-gene sequence. The simulation revealed that 6-mer palindromes typically occur once for every given 64-nucleotide sequence. An 8-mer palindrome was found to occur once for every 250-nucleotide sequence. These calculated frequencies matched well with the observed frequencies of palindrome in defined target sequences. This allowed the estimation that approximately 78 6-mer palindromes should exist on average in any given 5K gene.

[0402] FIG. 108 shows a non-limiting example of a study used to determine the presence of 6-mer palindromes in various genes, including Luc2, TGB-beta receptor-1, VEGF, VEGFR1, VEGFR2, HIVNL23, vaccinia, and HCV, which resulted in a large number of palindromic sites identified in each gene sequence. This algorithm considered only the Watson-Crick base pairs and excluded the presence of any mismatched and wobble base pairs. The inclusion of mismatches, wobble pairs and non-Watson-Crick base pairs can result in a large number of semi-palindromic sites suitable for the design of additional minimal duplex forming oligonucleotides.

[0403] FIG. 109 shows a non-limiting example of DFO mediated reduction of TGF-beta receptor-1 target RNA expression. Self complementary DFO palindrome/repeat sequences shown in Table I (e.g., compound #35038, 35041, 35044, and 35045) were designed against TGF-beta receptor-1 RNA targets and were screened in cell culture experiments and irrelevant controls (Control 1, Control 2) and untreated cells along with a transfection control (LF2K). NMuMg cells were transfected with 0.5 uL/well of lipid complexed with 25 and 100 nM DFO. Cells were incubated at 37° for 24 h in the continued presence of the DFO transfection mixture. At 24 h, RNA was prepared from each well of treated cells. The supernatants with the transfection mixtures were first removed and discarded, then the, cells were lysed and RNA prepared from each well. Target gene expression following treatment was evaluated by RT-PCR for the TGF-beta receptor mRNA and for a control gene (36B4, an RNA polymerase subunit) for normalization. As shown in the figure, the DFO constructs displayed potent inhibition of TGF-beta receptor-1 RNA expression in this system.

[0404] FIG. 110 shows a non-limiting example inhibition of HBV RNA using multifunctional siNA constructs targeting HBV and PKC-alpha RNA in HepG2 cells.

[0405] FIG. 111 shows a non-limiting example inhibition of PKC-alpha RNA using multifunctional siNA constructs targeting HBV and PKC-alpha RNA in HepG2 cells.

[0406] FIG. 112(A-H) shows non-limiting examples of tethered multifunctional siNA constructs of the invention. In the examples shown, a linker (e.g., nucleotide or non-nucleotide linker) connects two siNA regions (e.g., two sense, two antisense, or alternately a sense and an antisense region together. Separate sense (or sense and antisense) sequences corresponding to a first target sequence and second target sequence are hybridized to their corresponding sense and/or antisense sequences in the multifunctional siNA. In addition, various conjugates, ligands, aptamers, polymers or reporter molecules can be attached to the linker region for selective or improved delivery and/or pharmacokinetic properties.

[0407] FIG. 113 shows a non-limiting example of various dendrimer based multifunctional siNA designs.

[0408] FIG. 114 shows a non-limiting example of various supramolecular multifunctional siNA designs.

[0409] FIG. 115 shows a non-limiting example of a dicer enabled multifunctional siNA design using a 30 nucleotide precursor siNA construct. A 30 base pair duplex is cleaved by Dicer into 22 and 8 base pair products from either end (8 b.p. fragments not shown). For ease of presentation the overhangs generated by dicer are not shown—but can be compensated for. Three targeting sequences are shown. The required sequence identity overlapped is indicated by grey boxes. The N′s of the parent 30 b.p. siNA are suggested sites of 2′-OH positions to enable Dicer cleavage if this is tested in stabilized chemistries. Note that processing of a 30mer duplex by Dicer RNase III does not give a precise 22+8 cleavage, but rather produces a series of closely related products (with 22+8 being the primary site). Therefore, processing by Dicer will yield a series of active siNAs.

[0410] FIG. 116 shows a non-limiting example of a dicer enabled multifunctional siNA design using a 40 nucleotide precursor siNA construct. A 40 base pair duplex is cleaved by Dicer into 20 base pair products from either end. For ease of presentation the overhangs generated by dicer are not shown—but can be compensated for. Four targeting sequences are shown in four colors, blue, light-blue and red and orange. The required sequence identity overlapped is indicated by grey boxes. This design format can be extended to larger RNAs. If chemically stabilized siNAs are bound by Dicer, then strategically located ribonucleotide linkages can enable designer cleavage products that permit our more extensive repertoire of multifunctional designs. For example cleavage products not limited to the Dicer standard of approximately 22-nucleotides can allow multifunctional siNA constructs with a target sequence identity overlap ranging from, for example, about 3 to about 15 nucleotides.

[0411] FIG. 117 shows a non-limiting example of inhibition of HBV RNA by dicer enabled multifunctional siNA constructs targeting HBV site 263. When the first 17 nucleotides of a siNA antisense strand (e.g., 21 nucleotide strands in a duplex with 3′-TT overhangs) are complementary to a target RNA, robust silencing was observed at 25 nM. 80% silencing was observed with only 16 nucleotide complementarity in the same format.

[0412] FIG. 118 shows a non-limiting example of additional multifunctional siNA construct designs of the invention. In one example, a conjugate, ligand, aptamer, label, or other moiety is attached to a region of the multifunctional siNA to enable improved delivery or pharmacokinetic profiling.

[0413] FIG. 119 shows a non-limiting example of additional multifunctional siNA construct designs of the invention. In one example, a conjugate, ligand, aptamer, label, or other moiety is attached to a region of the multifunctional siNA to enable improved delivery or pharmacokinetic profiling.

[0414] FIG. 120 shows a non-limiting example of an experiment designed to determine the effect of absolute based paired sequence length of siNA constructs on RNAi efficacy. A well characterized site for siNA mediated inhibition, HBV RNA site 263 was chosen and siNA molecules ranging in length from 19 to 39 ribonucleotide base pairs in length with 3′-terminal dinucleotide TT overhangs. Transfection of the human hepatocellular carcinoma cell line, Hep G2, with replication-competent HBV DNA results in the expression of HBV proteins and the production of virions. To test the efficacy of differencing length siNAs targeted against HBV RNA, several siNA duplexes targeting site 263 within HBV pregenomic RNA were co-transfected with HBV genomic DNA once at 25 nM with lipid at 12.5 ug/ml into Hep G2 cells, and the subsequent levels of HBV RNA analyzed by RT PCR compared to cells treated with an inverted siNA control to site 263 and untreated cells. As shown in the figure, the siNA constructs from 19 to 39 base pairs were all efficacious in inhibiting HBV RNA in this system.

### DETAILED DESCRIPTION OF THE INVENTION

### Mechanism of Action of Nucleic Acid Molecules of the Invention

[0415] The discussion that follows discusses the proposed mechanism of RNA interference mediated by short interfering RNA as is presently known, and is not meant to be limiting and is not an admission of prior art. Applicant demonstrates herein that chemically-modified short interfering nucleic acids possess similar or improved capacity to mediate RNAi as do siRNA molecules and are expected to possess improved stability and activity in vivo; therefore, this discussion is not meant to be limited to siRNA only and can be applied to siNA as a whole. By “improved capacity to mediate RNAi” or “improved RNAi activity” is meant to include RNAi activity measured in vitro and/or in vivo where the RNAi activity is a reflection of both the ability of the siNA to mediate RNAi and the stability of the siNAs of the invention. In this invention, the product of these activities can be increased in vitro and/or in vivo compared to an all RNA siRNA or a siNA containing a plurality of ribonucleotides. In some cases, the activity or stability of the siNA molecule can be decreased (i.e., less than ten-fold), but the overall activity of the siNA molecule is enhanced in vitro and/or in vivo.

[0416] RNA interference refers to the process of sequence specific post-transcriptional gene silencing in animals mediated by short interfering RNAs (siRNAs) (Zamore et al., 2000, Cell, 101, 25-33; Fire et al., 1998, Nature, 391, 806). The corresponding process in plants is commonly referred to as post-transcriptional gene silencing or RNA silencing and is also referred to as quelling in fungi. The process of post-transcriptional gene silencing is thought to be an evolutionarily-conserved cellular defense mechanism used to prevent the expression of foreign genes which is commonly shared by diverse flora and phyla (Fire et al., 1999, Trends Genet., 15, 358). Such protection from foreign gene expression may have evolved in response to the production of double-stranded RNAs (dsRNAs) derived from viral infection or the random integration of transposon elements into a host genome via a cellular response that specifically destroys homologous single-stranded RNA or viral genomic RNA. The presence of dsRNA in cells triggers the RNAi response though a mechanism that has yet to be fully characterized. This mechanism appears to be different from the interferon response that results from dsRNA-mediated activation of protein kinase PKR and 2′,5′-oligoadenylate synthetase resulting in non-specific cleavage of mRNA by ribonuclease L.

[0417] The presence of long dsRNAs in cells stimulates the activity of a ribonuclease III enzyme referred to as Dicer. Dicer is involved in the processing of the dsRNA into short pieces of dsRNA known as short interfering RNAs (siRNAs) (Berstein et al., 2001, Nature, 409, 363). Short interfering RNAs derived from Dicer activity are typically about 21 to about 23 nucleotides in length and comprise about 19 base pair duplexes. Dicer has also been implicated in the excision of 21- and 22-nucleotide small temporal RNAs (stRNAs) from precursor RNA of conserved structure that are implicated in translational control (Hutvagner et al., 2001, Science, 293, 834). The RNAi response also features an endonuclease complex containing a siRNA, commonly referred to as an RNA-induced silencing complex (RISC), which mediates cleavage of single-stranded RNA having sequence homologous to the siRNA. Cleavage of the target RNA takes place in the middle of the region complementary to the guide sequence of the siRNA duplex (Elbashir et al., 2001, Genes Dev., 15, 188). In addition, RNA interference can also involve small RNA (e.g., micro-RNA or miRNA) mediated gene silencing, presumably though cellular mechanisms that regulate chromatin structure and thereby prevent transcription of target gene sequences (see for example Allshire, 2002, Science, 297, 1818-1819; Volpe et al., 2002, Science, 297, 1833-1837; Jenuwein, 2002, Science, 297, 2215-2218; and Hall et al., 2002, Science, 297, 2232-2237). As such, siNA molecules of the invention can be used to mediate gene silencing via interaction with RNA transcripts or alternately by interaction with particular gene sequences, wherein such interaction results in gene silencing either at the transcriptional level or post-transcriptional level.

[0418] RNAi has been studied in a variety of systems. Fire et al., 1998, Nature, 391, 806, were the first to observe RNAi in C. elegans. Wianny and Goetz, 1999, Nature Cell Biol., 2, 70, describe RNAi mediated by dsRNA in mouse embryos. Hammond et al., 2000, Nature, 404, 293, describe RNAi in Drosophila cells transfected with dsRNA. Elbashir et al., 2001, Nature, 411, 494, describe RNAi induced by introduction of duplexes of synthetic 21-nucleotide RNAs in cultured mammalian cells including human embryonic kidney and HeLa cells. Recent work in Drosophila embryonic lysates has revealed certain requirements for siRNA length, structure, chemical composition, and sequence that are essential to mediate efficient RNAi activity. These studies have shown that 21 nucleotide siRNA duplexes are most active when containing two 2-nucleotide 3′-terminal nucleotide overhangs. Furthermore, substitution of one or both siRNA strands with 2′-deoxy or 2′-O-methyl nucleotides abolishes RNAi activity, whereas substitution of 3′-terminal siRNA nucleotides with deoxy nucleotides was shown to be tolerated. Mismatch sequences in the center of the siRNA duplex were also shown to abolish RNAi activity. In addition, these studies also indicate that the position of the cleavage site in the target RNA is defined by the 5′-end of the siRNA guide sequence rather than the 3′-end (Elbashir et al., 2001, EMBO J., 20, 6877). Other studies have indicated that a 5′-phosphate on the target-complementary strand of a siRNA duplex is required for siRNA activity and that ATP is utilized to maintain the 5′-phosphate moiety on the siRNA (Nykanen et al., 2001, Cell, 107, 309); however, siRNA molecules lacking a 5′-phosphate are active when introduced exogenously, suggesting that 5′-phosphorylation of siRNA constructs may occur in vivo.

### Duplex Forming Oligonucleotides (DFO) of the Invention

[0419] In one embodiment, the invention features siNA molecules comprising duplex forming oligonucleotides (DFO) that can self-assemble into double stranded oligonucleotides. The duplex forming oligonucleotides of the invention can be chemically synthesized or expressed from transcription units and/or vectors. The DFO molecules of the instant invention provide useful reagents and methods for a variety of therapeutic, diagnostic, agricultural, veterinary, target validation, genomic discovery, genetic engineering and pharmacogenomic applications.

[0420] Applicant demonstrates herein that certain oligonucleotides, referred to herein for convenience but not limitation as duplex forming oligonucleotides or DFO molecules, are potent mediators of sequence specific regulation of gene expression. The oligonucleotides of the invention are distinct from other nucleic acid sequences known in the art (e.g., siRNA, miRNA, stRNA, shRNA, antisense oligonucleotides etc.) in that they represent a class of linear polynucleotide sequences that are designed to self-assemble into double stranded oligonucleotides, where each strand in the double stranded oligonucleotides comprises a nucleotide sequence that is complementary to a target nucleic acid molecule. Nucleic acid molecules of the invention can thus self assemble into functional duplexes in which each strand of the duplex comprises the same polynucleotide sequence and each strand comprises a nucleotide sequence that is complementary to a target nucleic acid molecule.

[0421] Generally, double stranded oligonucleotides are formed by the assembly of two distinct oligonucleotide sequences where the oligonucleotide sequence of one strand is complementary to the oligonucleotide sequence of the second strand; such double stranded oligonucleotides are assembled from two separate oligonucleotides, or from a single molecule that folds on itself to form a double stranded structure, often referred to in the field as hairpin stem-loop structure (e.g., shRNA or short hairpin RNA). These double stranded oligonucleotides known in the art all have a common feature in that each strand of the duplex has a distinct nucleotide sequence.

[0422] Distinct from the double stranded nucleic acid molecules known in the art, the applicants have developed a novel, potentially cost effective and simplified method of forming a double stranded nucleic acid molecule starting from a single stranded or linear oligonucleotide. The two strands of the double stranded oligonucleotide formed according to the instant invention have the same nucleotide sequence and are not covalently linked to each other. Such double-stranded oligonucleotides molecules can be readily linked post-synthetically by methods and reagents known in the art and are within the scope of the invention. In one embodiment, the single stranded oligonucleotide of the invention (the duplex forming oligonucleotide) that forms a double stranded oligonucleotide comprises a first region and a second region, where the second region includes a nucleotide sequence that is an inverted repeat of the nucleotide sequence in the first region, or a portion thereof, such that the single stranded oligonucleotide self assembles to form a duplex oligonucleotide in which the nucleotide sequence of one strand of the duplex is the same as the nucleotide sequence of the second strand. Non-limiting examples of such duplex forming oligonucleotides are illustrated in FIGS. 94 and 95. These duplex forming oligonucleotides (DFOs) can optionally include certain palindrome or repeat sequences where such palindrome or repeat sequences are present in between the first region and the second region of the DFO.

[0423] In one embodiment, the invention features a duplex forming oligonucleotide (DFO) molecule, wherein the DFO comprises a duplex forming self complementary nucleic acid sequence that has nucleotide sequence complementary to a target nucleic acid sequence. The DFO molecule can comprise a single self complementary sequence or a duplex resulting from assembly of such self complementary sequences.

[0424] In one embodiment, a duplex forming oligonucleotide (DFO) of the invention comprises a first region and a second region, wherein the second region comprises a nucleotide sequence comprising an inverted repeat of nucleotide sequence of the first region such that the DFO molecule can assemble into a double stranded oligonucleotide. Such double stranded oligonucleotides can act as a short interfering nucleic acid (siNA) to modulate gene expression. Each strand of the double stranded oligonucleotide duplex formed by DFO molecules of the invention can comprise a nucleotide sequence region that is complementary to the same nucleotide sequence in a target nucleic acid molecule (e.g., target RNA).

[0425] In one embodiment, the invention features a single stranded DFO that can assemble into a double stranded oligonucleotide. The applicant has surprisingly found that a single stranded oligonucleotide with nucleotide regions of self complementarity can readily assemble into duplex oligonucleotide constructs. Such DFOs can assemble into duplexes that can inhibit gene expression in a sequence specific manner. The DFO molecules of the invention comprise a first region with nucleotide sequence that is complementary to the nucleotide sequence of a second region and where the sequence of the first region is complementary to a target nucleic acid (e.g., RNA). The DFO can form a double stranded oligonucleotide wherein a portion of each strand of the double stranded oligonucleotide comprises a sequence complementary to a target nucleic acid sequence.

[0426] In one embodiment, the invention features a double stranded oligonucleotide, wherein the two strands of the double stranded oligonucleotide are not covalently linked to each other, and wherein each strand of the double stranded oligonucleotide comprises a nucleotide sequence that is complementary to the same nucleotide sequence in a target nucleic acid molecule or a portion thereof. In another embodiment, the two strands of the double stranded oligonucleotide share an identical nucleotide sequence of at least about 15, preferably at least about 16, 17, 18, 19, 20, or 21 nucleotides.

[0427] In one embodiment, a DFO molecule of the invention comprises a structure having Formula DFO-I:

5′-p-X Z X′-3′

wherein Z comprises a palindromic or repeat nucleic acid sequence optionally with one or more modified nucleotides (e.g., nucleotide with a modified base, such as 2-amino purine, 2-amino-1,6-dihydro purine or a universal base), for example of length about 2 to about 24 nucleotides in even numbers (e.g., about 2, 4, 6, 8, 10, 12, 14, 16, 18, 20, or 22 or 24 nucleotides), X represents a nucleic acid sequence, for example of length between about 1 to about 21 nucleotides (e.g., about 1, 2, 3, 4, 5, 6, 7, 8, 9, 10, 11, 12, 13, 14, 15, 16, 17, 18, 19, 20, or 21 nucleotides), X′ comprises a nucleic acid sequence, for example of length about 1 and about 21 nucleotides (e.g., about 1, 2, 3, 4, 5, 6, 7, 8, 9, 10, 11, 12, 13, 14, 15, 16, 17, 18, 19, 20 or 21 nucleotides) having nucleotide sequence complementarity to sequence X or a portion thereof, p comprises a terminal phosphate group that can be present or absent, and wherein sequence X and Z, either independently or together, comprise nucleotide sequence that is complementary to a target nucleic acid sequence or a portion thereof and is of length sufficient to interact (e.g., base pair) with the target nucleic acid sequence or a portion thereof. For example, X independently can comprise a sequence from about 12 to about 21 or more (e.g., about 12, 13, 14, 15, 16, 17, 18, 19, 20, 21, or more) nucleotides in length that is complementary to nucleotide sequence in a target RNA or a portion thereof. In another non-limiting example, the length of the nucleotide sequence of X and Z together, when X is present, that is complementary to the target RNA or a portion thereof is from about 12 to about 21 or more nucleotides (e.g., about 12, 13, 14, 15, 16, 17, 18, 19, 20, 21, or more). In yet another non-limiting example, when X is absent, the length of the nucleotide sequence of Z that is complementary to the target RNA or a portion thereof is from about 12 to about 24 or more nucleotides (e.g., about 12, 14, 16, 18, 20, 22, 24, or more). In one embodiment X, Z and X′ are independently oligonucleotides, where X and/or Z comprises a nucleotide sequence of length sufficient to interact (e.g., base pair) with a nucleotide sequence in the target RNA or a portion thereof. In one embodiment, the lengths of oligonucleotides X and X′ are identical. In another embodiment, the lengths of oligonucleotides X and X′ are not identical. In another embodiment, the lengths of oligonucleotides X and Z, or Z and X′, or X, Z and X′ are either identical or different.

[0428] When a sequence is described in this specification as being of “sufficient” length to interact (i.e., base pair) with another sequence, it is meant that the the length is such that the number of bonds (e.g., hydrogen bonds) formed between the two sequences is enough to enable the two sequence to form a duplex under the conditions of interest. Such conditions can be in vitro (e.g., for diagnostic or assay purposes) or in vivo (e.g., for therapeutic purposes). It is a simple and routine matter to determine such lengths.

[0429] In one embodiment, the invention features a double stranded oligonucleotide construct having Formula DFO-I(a):

5′-p-X Z X′-3′

3′-X′ Z X-p-5′

wherein Z comprises a palindromic or repeat nucleic acid sequence or palindromic or repeat-like nucleic acid sequence with one or more modified nucleotides (e.g., nucleotides with a modified base, such as 2-amino purine, 2-amino-1,6-dihydro purine or a universal base), for example of length about 2 to about 24 nucleotides in even numbers (e.g., about 2, 4, 6, 8, 10, 12, 14, 16, 18, 20, 22 or 24 nucleotides), X represents a nucleic acid sequence, for example of length about 1 to about 21 nucleotides (e.g., about 1, 2, 3, 4, 5, 6, 7, 8, 9, 10, 11, 12, 13, 14, 15, 16, 17, 18, 19, 20, or 21 nucleotides), X′ comprises a nucleic acid sequence, for example of length about 1 to about 21 nucleotides (e.g., about 1, 2, 3, 4, 5, 6, 7, 8, 9, 10, 11, 12, 13, 14, 15, 16, 17, 18, 19, 20 or 21 nucleotides) having nucleotide sequence complementarity to sequence X or a portion thereof, p comprises a terminal phosphate group that can be present or absent, and wherein each X and Z independently comprises a nucleotide sequence that is complementary to a target nucleic acid sequence or a portion thereof and is of length sufficient to interact with the target nucleic acid sequence of a portion thereof. For example, sequence X independently can comprise a sequence from about 12 to about 21 or more nucleotides (e.g., about 12, 13, 14, 15, 16, 17, 18, 19, 20, 21, or more) in length that is complementary to a nucleotide sequence in a target RNA or a portion thereof. In another non-limiting example, the length of the nucleotide sequence of X and Z together (when X is present) that is complementary to the target RNA or a portion thereof is from about 12 to about 21 or more nucleotides (e.g., about 12, 13, 14, 15, 16, 17, 18, 19, 20, 21, or more). In yet another non-limiting example, when X is absent, the length of the nucleotide sequence of Z that is complementary to the target RNA or a portion thereof is from about 12 to about 24 or more nucleotides (e.g., about 12, 14, 16, 18, 20, 22, 24 or more). In one embodiment X, Z and X′ are independently oligonucleotides, where X and/or Z comprises a nucleotide sequence of length sufficient to interact (e.g., base pair) with nucleotide sequence in the target RNA or a portion thereof. In one embodiment, the lengths of oligonucleotides X and X′ are identical. In another embodiment, the lengths of oligonucleotides X and X′ are not identical. In another embodiment, the lengths of oligonucleotides X and Z or Z and X′ or X, Z and X′ are either identical or different. In one embodiment, the double stranded oligonucleotide construct of Formula I(a) includes one or more, specifically 1, 2, 3 or 4, mismatches, to the extent such mismatches do not significantly diminish the ability of the double stranded oligonucleotide to inhibit target gene expression.

[0430] In one embodiment, a DFO molecule of the invention comprises structure having Formula DFO-II:

5′-p-X X′-3′

wherein each X and X′ are independently oligonucleotides of length about 12 nucleotides to about 21 nucleotides, wherein X comprises, for example, a nucleic acid sequence of length about 12 to about 21 nucleotides (e.g., about 12, 13, 14, 15, 16, 17, 18, 19, 20 or 21 nucleotides), X′ comprises a nucleic acid sequence, for example of length about 12 to about 21 nucleotides (e.g., about 12, 13, 14, 15, 16, 17, 18, 19, 20, or 21 nucleotides) having nucleotide sequence complementarity to sequence X or a portion thereof, p comprises a terminal phosphate group that can be present or absent, and wherein X comprises a nucleotide sequence that is complementary to a target nucleic acid sequence (e.g., RNA) or a portion thereof and is of length sufficient to interact (e.g., base pair) with the target nucleic acid sequence of a portion thereof. In one embodiment, the length of oligonucleotides X and X′ are identical. In another embodiment the length of oligonucleotides X and X′ are not identical. In one embodiment, length of the oligonucleotides X and X′ are sufficient to form a relatively stable double stranded oligonucleotide.

[0431] In one embodiment, the invention features a double stranded oligonucleotide construct having Formula DFO-II(a):

5′-p-X X′-3′

3′-X′ X-p-5′

wherein each X and X′ are independently oligonucleotides of length about 12 nucleotides to about 21 nucleotides, wherein X comprises a nucleic acid sequence, for example of length about 12 to about 21 nucleotides (e.g., about 12, 13, 14, 15, 16, 17, 18, 19, 20 or 21 nucleotides), X′ comprises a nucleic acid sequence, for example of length about 12 to about 21 nucleotides (e.g., about 12, 13, 14, 15, 16, 17, 18, 19, 20 or 21 nucleotides) having nucleotide sequence complementarity to sequence X or a portion thereof, p comprises a terminal phosphate group that can be present or absent, and wherein X comprises nucleotide sequence that is complementary to a target nucleic acid sequence or a portion thereof and is of length sufficient to interact (e.g., base pair) with the target nucleic acid sequence (e.g., RNA) of a portion thereof. In one embodiment, the lengths of oligonucleotides X and X′ are identical. In another embodiment, the lengths of oligonucleotides X and X′ are not identical. In one embodiment, the lengths of the oligonucleotides X and X′ are sufficient to form a relatively stable double stranded oligonucleotide. In one embodiment, the double stranded oligonucleotide construct of Formula II(a) includes one or more, specifically 1, 2, 3 or 4, mismatches, to the extent such mismatches do not significantly diminish the ability of the double stranded oligonucleotide to inhibit target gene expression.

[0432] In one embodiment, the invention features a DFO molecule having Formula DFO-I(b):

5′-p-Z-3′

where Z comprises a palindromic or repeat nucleic acid sequence optionally including one or more non-standard or modified nucleotides (e.g., nucleotide with a modified base, such as 2-amino purine or a universal base) that can facilitate base-pairing with other nucleotides. Z can be, for example, of length sufficient to interact (e.g., base pair) with nucleotide sequence of a target nucleic acid (e.g., RNA) molecule, preferably of length of at least 12 nucleotides, specifically about 12 to about 24 nucleotides (e.g., about 12, 14, 16, 18, 20, 22 or 24 nucleotides). p represents a terminal phosphate group that can be present or absent.

[0433] In one embodiment, a DFO molecule having any of Formula DFO-I, DFO-I(a), DFO-I(b), DFO-II(a) or DFO-II can comprise chemical modifications as described herein without limitation, such as, for example, nucleotides having any of Formulae I-VII, stabilization chemistries as described in Table IV, or any other combination of modified nucleotides and non-nucleotides as described in the various embodiments herein.

[0434] In one embodiment, the palidrome or repeat sequence or modified nucleotide (e.g., nucleotide with a modified base, such as 2-amino purine or a universal base) in Z of DFO constructs having Formula DFO-I, DFO-I(a) and DFO-I(b), comprises chemically modified nucleotides that are able to interact with a portion of the target nucleic acid sequence (e.g., modified base analogs that can form Watson Crick base pairs or non-Watson Crick base pairs).

[0435] In one embodiment, a DFO molecule of the invention, for example a DFO having Formula DFO-I or DFO-II, comprises about 15 to about 40 nucleotides (e.g., about 15, 16, 17, 18, 19, 20, 21, 22, 23, 24, 25, 26, 27, 28, 29, 30, 31, 32, 33, 34, 35, 36, 37, 38, 39, or 40 nucleotides). In one embodiment, a DFO molecule of the invention comprises one or more chemical modifications. In a non-limiting example, the introduction of chemically modified nucleotides and/or non-nucleotides into nucleic acid molecules of the invention provides a powerful tool in overcoming potential limitations of in vivo stability and bioavailability inherent to unmodified RNA molecules that are delivered exogenously. For example, the use of chemically modified nucleic acid molecules can enable a lower dose of a particular nucleic acid molecule for a given therapeutic effect since chemically modified nucleic acid molecules tend to have a longer half-life in serum or in cells or tissues. Furthermore, certain chemical modifications can improve the bioavailability and/or potency of nucleic acid molecules by not only enhancing half-life but also facilitating the targeting of nucleic acid molecules to particular organs, cells or tissues and/or improving cellular uptake of the nucleic acid molecules. Therefore, even if the activity of a chemically modified nucleic acid molecule is reduced in vitro as compared to a native/unmodified nucleic acid molecule, for example when compared to an unmodified RNA molecule, the overall activity of the modified nucleic acid molecule can be greater than the native or unmodified nucleic acid molecule due to improved stability, potency, duration of effect, bioavailability and/or delivery of the molecule.

Multifunctional or Multi-Targeted siNA Molecules of the Invention

[0436] In one embodiment, the invention features siNA molecules comprising multifunctional short interfering nucleic acid (multifunctional siNA) molecules that modulate the expression of one or more genes in a biologic system, such as a cell, tissue, or organism. The multifunctional short interfering nucleic acid (multifunctional siNA) molecules of the invention can target more than one region of the target nucleic acid sequence or can target sequences of more than one distinct target nucleic acid molecules. The multifunctional siNA molecules of the invention can be chemically synthesized or expressed from transcription units and/or vectors. The multifunctional siNA molecules of the instant invention provide useful reagents and methods for a variety of human applications, therapeutic, diagnostic, agricultural, veterinary, target validation, genomic discovery, genetic engineering and pharmacogenomic applications.

[0437] Applicant demonstrates herein that certain oligonucleotides, referred to herein for convenience but not limitation as multifunctional short interfering nucleic acid or multifunctional siNA molecules, are potent mediators of sequence specific regulation of gene expression. The multifunctional siNA molecules of the invention are distinct from other nucleic acid sequences known in the art (e.g., siRNA, miRNA, stRNA, shRNA, antisense oligonucleotides, etc.) in that they represent a class of polynucleotide molecules that are designed such that each strand in the multifunctional siNA construct comprises a nucleotide sequence that is complementary to a distinct nucleic acid sequence in one or more target nucleic acid molecules. A single multifunctional siNA molecule (generally a double-stranded molecule) of the invention can thus target more than one (e.g., 2, 3, 4, 5, or more) differing target nucleic acid target molecules. Nucleic acid molecules of the invention can also target more than one (e.g., 2, 3, 4, 5, or more) region of the same target nucleic acid sequence. As such multifunctional siNA molecules of the invention are useful in down regulating or inhibiting the expression of one or more target nucleic acid molecules. For example, a multifunctional siNA molecule of the invention can target nucleic acid molecules encoding a cytokine and its corresponding receptor(s), nucleic acid molecules encoding a virus or viral proteins and corresponding cellular proteins required for viral infection and/or replication, or differing strains of a particular virus. By reducing or inhibiting expression of more than one target nucleic acid molecule with one multifunctional siNA construct, multifunctional siNA molecules of the invention represent a class of potent therapeutic agents that can provide simultaneous inhibition of multiple targets within a disease related pathway. Such simultaneous inhibition can provide synergistic therapeutic treatment strategies without the need for separate preclinical and clinical development efforts or complex regulatory approval process.

[0438] Use of multifunctional siNA molecules that target more then one region of a target nucleic acid molecule (e.g., messenger RNA) is expected to provide potent inhibition of gene expression. For example, a single multifunctional siNA construct of the invention can target both conserved and variable regions of a target nucleic acid molecule, thereby allowing down regulation or inhibition of different splice variants encoded by a single gene, or allowing for targeting of both coding and non-coding regions of a target nucleic acid molecule.

[0439] Generally, double stranded oligonucleotides are formed by the assembly of two distinct oligonucleotides where the oligonucleotide sequence of one strand is complementary to the oligonucleotide sequence of the second strand; such double stranded oligonucleotides are generally assembled from two separate oligonucleotides (e.g., siRNA). Alternately, a duplex can be formed from a single molecule that folds on itself (e.g., shRNA or short hairpin RNA). These double stranded oligonucleotides are known in the art to mediate RNA interference and all have a common feature wherein only one nucleotide sequence region (guide sequence or the antisense sequence) has complementarity to a target nucleic acid sequence and the other strand (sense sequence) comprises nucleotide sequence that is homologous to the target nucleic acid sequence. Generally, the antisense sequence is retained in the active RISC complex and guides the RISC to the target nucleotide sequence by means of complementary base-pairing of the antisense sequence with the target sequence for mediating sequence-specific RNA interference. It is known in the art that in some cell culture systems, certain types of unmodified siRNAs can exhibit “off target” effects. It is hypothesized that this off-target effect involves the participation of the sense sequence instead of the antisense sequence of the siRNA in the RISC complex (see for example Schwarz et al., 2003, Cell, 115, 199-208). In this instance the sense sequence is believed to direct the RISC complex to a sequence (off-target sequence) that is distinct from the intended target sequence, resulting in the inhibition of the off-target sequence. In these double stranded nucleic acid molecules, each strand is complementary to a distinct target nucleic acid sequence. However, the off-targets that are affected by these dsRNAs are not entirely predictable and are non-specific.

[0440] Distinct from the double stranded nucleic acid molecules known in the art, the applicants have developed a novel, potentially cost effective and simplified method of down regulating or inhibiting the expression of more than one target nucleic acid sequence using a single multifunctional siNA construct. The multifunctional siNA molecules of the invention are designed to be double-stranded or partially double stranded, such that a portion of each strand or region of the multifunctional siNA is complementary to a target nucleic acid sequence of choice. As such, the multifunctional siNA molecules of the invention are not limited to targeting sequences that are complementary to each other, but rather to any two differing target nucleic acid sequences. Multifunctional siNA molecules of the invention are designed such that each strand or region of the multifunctional siNA molecule, that is complementary to a given target nucleic acid sequence, is of suitable length (e.g., from about 16 to about 28 nucleotides in length, preferably from about 18 to about 28 nucleotides in length) for mediating RNA interference against the target nucleic acid sequence. The complementarity between the target nucleic acid sequence and a strand or region of the multifunctional siNA must be sufficient (at least about 8 base pairs) for cleavage of the target nucleic acid sequence by RNA interference multifunctional siNA of the invention is expected to minimize off-target effects seen with certain siRNA sequences, such as those described in (Schwarz et al., supra).

[0441] It has been reported that dsRNAs of length between 29 base pairs and 36 base pairs (Tuschl et al., International PCT Publication No. WO 02/44321) do not mediate RNAi. One reason these dsRNAs are inactive may be the lack of turnover or dissociation of the strand that interacts with the target RNA sequence, such that the RISC complex is not able to efficiently interact with multiple copies of the target RNA resulting in a significant decrease in the potency and efficiency of the RNAi process. Applicant has surprisingly found that the multifunctional siNAs of the invention can overcome this hurdle and are capable of enhancing the efficiency and potency of RNAi process. As such, in certain embodiments of the invention, multifunctional siNAs of length between about 29 to about 36 base pairs can be designed such that, a portion of each strand of the multifunctional siNA molecule comprises a nucleotide sequence region that is complementary to a target nucleic acid of length sufficient to mediate RNAi efficiently (e.g., about 15 to about 23 base pairs) and a nucleotide sequence region that is not complementary to the target nucleic acid. By having both complementary and non-complementary portions in each strand of the multifunctional siNA, the multifunctional siNA can mediate RNA interference against a target nucleic acid sequence without being prohibitive to turnover or dissociation (e.g., where the length of each strand is too long to mediate RNAi against the respective target nucleic acid sequence). Furthermore, design of multifunctional siNA molecules of the invention with internal overlapping regions allows the multifunctional siNA molecules to be of favorable (decreased) size for mediating RNA interference and of size that is well suited for use as a therapeutic agent (e.g., wherein each strand is independently from about 18 to about 28 nucleotides in length). Non-limiting examples are illustrated in the enclosed FIGS. 96-101 and 112.

[0442] In one embodiment, a multifunctional siNA molecule of the invention comprises a first region and a second region, where the first region of the multifunctional siNA comprises A nucleotide sequence complementary to a nucleic acid sequence of a first target nucleic acid molecule, and the second region of the multifunctional siNA comprises nucleic acid sequence complementary to a nucleic acid sequence of a second target nucleic acid molecule. In one embodiment, a multifunctional siNA molecule of the invention comprises a first region and a second region, where the first region of the multifunctional siNA comprises nucleotide sequence complementary to a nucleic acid sequence of the first region of a target nucleic acid molecule, and the second region of the multifunctional siNA comprises nucleotide sequence complementary to a nucleic acid sequence of a second region of a the target nucleic acid molecule. In another embodiment, the first region and second region of the multifunctional siNA can comprise separate nucleic acid sequences that share some degree of complementarity (e.g., from about 1 to about 10 complementary nucleotides). In certain embodiments, multifunctional siNA constructs comprising separate nucleic acid sequences can be readily linked post-synthetically by methods and reagents known in the art and such linked constructs are within the scope of the invention. Alternately, the first region and second region of the multifunctional siNA can comprise a single nucleic acid sequence having some degree of self complementarity, such as in a hairpin or stem-loop structure. Non-limiting examples of such double stranded and hairpin multifunctional short interfering nucleic acids are illustrated in FIGS. 96 and 97 respectively. These multifunctional short interfering nucleic acids (multifunctional siNAs) can optionally include certain overlapping nucleotide sequence where such overlapping nucleotide sequence is present in between the first region and the second region of the multifunctional siNA (see for example FIGS. 98 and 99).

[0443] In one embodiment, the invention features a multifunctional short interfering nucleic acid (multifunctional siNA) molecule, wherein each strand of the the multifunctional siNA independently comprises a first region of nucleic acid sequence that is complementary to a distinct target nucleic acid sequence and the second region of nucleotide sequence that is not complementary to the target sequence. The target nucleic acid sequence of each strand is in the same target nucleic acid molecule or different target nucleic acid molecules.

[0444] In another embodiment, the multifunctional siNA comprises two strands, where: (a) the first strand comprises a region having sequence complementarity to a target nucleic acid sequence (complementary region 1) and a region having no sequence complementarity to the target nucleotide sequence (non-complementary region 1); (b) the second strand of the multifunction siNA comprises a region having sequence complementarity to a target nucleic acid sequence that is distinct from the target nucleotide sequence complementary to the first strand nucleotide sequence (complementary region 2), and a region having no sequence complementarity to the target nucleotide sequence of complementary region 2 (non-complementary region 2); (c) the complementary region 1 of the first strand comprises a nucleotide sequence that is complementary to a nucleotide sequence in the non-complementary region 2 of the second strand and the complementary region 2 of the second strand comprises a nucleotide sequence that is complementary to a nucleotide sequence in the non-complementary region 1 of the first strand. The target nucleic acid sequence of complementary region 1 and complementary region 2 is in the same target nucleic acid molecule or different target nucleic acid molecules.

[0445] In another embodiment, the multifunctional siNA comprises two strands, where: (a) the first strand comprises a region having sequence complementarity to a target nucleic acid sequence derived from a gene (e.g., mammalian gene, viral gene or genome, bacterial gene or a plant gene) (complementary region 1) and a region having no sequence complementarity to the target nucleotide sequence of complementary region 1 (non-complementary region 1); (b) the second strand of the multifunction siNA comprises a region having sequence complementarity to a target nucleic acid sequence derived from a gene that is distinct from the gene of complementary region 1 (complementary region 2), and a region having no sequence complementarity to the target nucleotide sequence of complementary region 2 (non-complementary region 2); (c) the complementary region 1 of the first strand comprises a nucleotide sequence that is complementary to a nucleotide sequence in the non-complementary region 2 of the second strand and the complementary region 2 of the second strand comprises a nucleotide sequence that is complementary to a nucleotide sequence in the non-complementary region 1 of the first strand.

[0446] In another embodiment, the multifunctional siNA comprises two strands, where: (a) the first strand comprises a region having sequence complementarity to a target nucleic acid sequence derived from a gene (e.g., mammalian gene, viral gene or genome, bacterial gene or a plant gene) (complementary region 1) and a region having no sequence complementarity to the target nucleotide sequence of complementary region 1 (non-complementary region 1); (b) the second strand of the multifunction siNA comprises a region having sequence complementarity to a target nucleic acid sequence distinct from the target nucleic acid sequence of complementary region 1(complementary region 2), provided, however, that the target nucleic acid sequence for complementary region 1 and target nucleic acid sequence for complementary region 2 are both derived from the same gene, and a region having no sequence complementarity to the target nucleotide sequence of complementary region 2 (non-complementary region 2); (c) the complementary region 1 of the first strand comprises a nucleotide sequence that is complementary to a nucleotide sequence in the non-complementary region 2 of the second strand and the complementary region 2 of the second strand comprises a nucleotide sequence that is complementary to nucleotide sequence in the non-complementary region 1 of the first strand.

[0447] In one embodiment, the invention features a multifunctional short interfering nucleic acid (multifunctional siNA) molecule, wherein the multifunctional siNA comprises two complementary nucleic acid sequences in which the first sequence comprises a first region having nucleotide sequence complementary to nucleotide sequence within a target nucleic acid molecule, and in which the second sequence comprises a first region having nucleotide sequence complementary to a distinct nucleotide sequence within the same target nucleic acid molecule. Preferably, the first region of the first sequence is also complementary to the nucleotide sequence of the second region of the second sequence, and where the first region of the second sequence is complementary to the nucleotide sequence of the second region of the first sequence,

[0448] In one embodiment, the invention features a multifunctional short interfering nucleic acid (multifunctional siNA) molecule, wherein the multifunctional siNA comprises two complementary nucleic acid sequences in which the first sequence comprises a first region having a nucleotide sequence complementary to a nucleotide sequence within a first target nucleic acid molecule, and in which the second sequence comprises a first region having a nucleotide sequence complementary to a distinct nucleotide sequence within a second target nucleic acid molecule. Preferably, the first region of the first sequence is also complementary to the nucleotide sequence of the second region of the second sequence, and where the first region of the second sequence is complementary to the nucleotide sequence of the second region of the first sequence,

[0449] In one embodiment, the invention features a multifunctional siNA molecule comprising a first region and a second region, where the first region comprises a nucleic acid sequence having between about 18 to about 28 nucleotides complementary to a nucleic acid sequence within a first target nucleic acid molecule, and the second region comprises nucleotide sequence having between about 18 to about 28 nucleotides complementary to a distinct nucleic acid sequence within a second target nucleic acid molecule.

[0450] In one embodiment, the invention features a multifunctional siNA molecule comprising a first region and a second region, where the first region comprises nucleic acid sequence having between about 18 to about 28 nucleotides complementary to a nucleic acid sequence within a target nucleic acid molecule, and the second region comprises nucleotide sequence having between about 18 to about 28 nucleotides complementary to a distinct nucleic acid sequence within the same target nucleic acid molecule.

[0451] In one embodiment, the invention features a double stranded multifunctional short interfering nucleic acid (multifunctional siNA) molecule, wherein one strand of the multifunctional siNA comprises a first region having nucleotide sequence complementary to a first target nucleic acid sequence, and the second strand comprises a first region having a nucleotide sequence complementary to a second target nucleic acid sequence. The first and second target nucleic acid sequences can be present in separate target nucleic acid molecules or can be different regions within the same target nucleic acid molecule. As such, multifunctional siNA molecules of the invention can be used to target the expression of different genes, splice variants of the same gene, both mutant and conserved regions of one or more gene transcripts, or both coding and non-coding sequences of the same or differing genes or gene transcripts.

[0452] In one embodiment, a target nucleic acid molecule of the invention encodes a single protein. In another embodiment, a target nucleic acid molecule encodes more than one protein (e.g., 1, 2, 3, 4, 5 or more proteins). As such, a multifunctional siNA construct of the invention can be used to down regulate or inhibit the expression of several proteins. For example, a multifunctional siNA molecule comprising a region in one strand having nucleotide sequence complementarity to a first target nucleic acid sequence derived from a gene encoding one protein (e.g., a cytokine, such as vascular endothelial growth factor or VEGF) and the second strand comprising a region with nucleotide sequence complementarity to a second target nucleic acid sequence present in target nucleic acid molecules derived from genes encoding two proteins (e.g., two differing receptors, such as VEGF receptor 1 and VEGF receptor 2, for a single cytokine, such as VEGF) can be used to down regulate, inhibit, or shut down a particular biologic pathway by targeting, for example, a cytokine and receptors for the cytokine, or a ligand and receptors for the ligand.

[0453] In one embodiment the invention takes advantage of conserved nucleotide sequences present in different isoforms of cytokines or ligands and receptors for the cytokines or ligands. By designing multifunctional siNAs in a manner where one strand includes a sequence that is complementary to a target nucleic acid sequence conserved among various isoforms of a cytokine and the other strand includes sequence that is complementary to a target nucleic acid sequence conserved among the receptors for the cytokine, it is possible to selectively and effectively modulate or inhibit a biological pathway or multiple genes in a biological pathway using a single multifunctional siNA.

[0454] In another nonlimiting example, a multifunctional siNA molecule comprising a region in one strand having a nucleotide sequence complementarity to a first target nucleic acid sequence present in target nucleic acid molecules encoding two proteins (e.g., two isoforms of a cytokine such as VEGF, including for example any of VEGF-A, VEGF-B, VEGF-C, and/or VEGF-D) and the second strand comprising a region with a nucleotide sequence complementarity to a second target nucleic acid sequence present in target nucleotide molecules encoding two additional proteins (e.g., two differing receptors for the cytokine, such as VEGFR1, VEGFR2, and/or VEGFR3) can be used to down regulate, inhibit, or shut down a particular biologic pathway by targeting different isoforms of a cytokine and receptors for such cytokines.

[0455] In another non-limiting example, a multifunctional siNA molecule comprising a region in one strand having a nucleotide sequence complementarity to a first target nucleic acid sequence derived from a target nucleic acid molecule encoding a virus or a viral protein (e.g., HIV) and the second strand comprising a region having a nucleotide sequence complementarity to a second target nucleic acid sequence present in target nucleic acid molecule encoding a cellular protein (e.g., a receptor for the virus, such as CCR5 receptor for HIV) can be used to down regulate, inhibit, or shut down the viral replication and infection by targeting the virus and cellular proteins necessary for viral infection or replication.

[0456] In another nonlimiting example, a multifunctional siNA molecule comprising a region in one strand having a nucleotide sequence complementarity to a first target nucleic acid sequence (e.g., conserved sequence) present in a target nucleic acid molecule such as a viral genome (e.g., HIV genomic RNA) and the second strand comprising a region having a nucleotide sequence complementarity to a second target nucleic acid sequence (e.g., conserved sequence) present in target nucleic acid molecule derived from a gene encoding a viral protein (e.g., HIV proteins, such as TAT, REV, ENV or NEF) to down regulate, inhibit, or shut down the viral replication and infection by targeting the viral genome and viral encoded proteins necessary for viral infection or replication.

[0457] In one embodiment the invention takes advantage of conserved nucleotide sequences present in different strains, isotypes or forms of a virus and genes encoded by these different strains, isotypes and forms of the virus. By designing multifunctional siNAs in a manner where one strand includes a sequence that is complementary to target nucleic acid sequence conserved among various strains, isotypes or forms of a virus and the other strand includes sequence that is complementary to target nucleic acid sequence conserved in a protein encoded by the virus, it is possible to selectively and effectively inhibit viral replication or infection using a single multifunctional siNA.

[0458] In one embodiment, a multifunctional short interfering nucleic acid (multifunctional siNA) of the invention comprises a region in each strand, wherein the region in one strand comprises nucleotide sequence complementary to a cytokine and the region in the second strand comprises nucleotide sequence complementary to a corresponding receptor for the cytokine. Non-limiting examples of cytokines include vascular endothelial growth factors (e.g., VEGF-A, VEGF-B, VEGF-C, VEGF-D), interleukins (e.g., IL-1alpha, IL-1beta, IL-2, IL-3, IL-4, IL-5, IL-6, IL-7, IL-8, IL-9, IL-10, IL-11, IL-12, IL-13), tumor necrosis factors (e.g., TNF-alpha, TNF-beta), colony stimulating factors (e.g., CSFs), interferons (e.g., IFN-gamma), nerve growth factors (e.g., NGFs), epidermal growth factors (e.g., EGF), platelet derived growth factors (e.g., PDGF), fibroblast growth factors (e.g., FGF), transforming growth factors (e.g., TGF-alpha and TGF-beta), erythropoietins (e.g., Epo), and Insulin like growth factors (e.g., IGF-2) and non-limiting examples of cytokine receptors include receptors for each of the above cytokines.

[0459] In one embodiment, a multifunctional short interfering nucleic acid (multifunctional siNA) of the invention comprises a first region and a second region, wherein the first region comprises nucleotide sequence complementary to a viral RNA of a first viral strain and the second region comprises nucleotide sequence complementary to a viral RNA of a second viral strain. In one embodiment, the first and second regions can comprise nucleotide sequence complementary to shared or conserved RNA sequences of differing viral strains or classes or viral strains. Non-limiting examples of viruses include Hepatitis C Virus (HCV), Hepatitis B Virus (HBV), Human Immunodeficiency Virus type 1 (HIV-1), Human Immunodeficiency Virus type 2 (HIV-2), West Nile Virus (WNV), cytomegalovirus (CMV), respiratory syncytial virus (RSV), influenza virus, rhinovirus, papillomavirus (HPV), Herpes Simplex Virus (HSV), severe acute respiratory virus (SARS), and other viruses such as HTLV.

[0460] In one embodiment, a multifunctional short interfering nucleic acid (multifunctional siNA) of the invention comprises a first region and a second region, wherein the first region comprises a nucleotide sequence complementary to a viral RNA encoding one or more viruses (e.g., one or more strains of virus) and the second region comprises a nucleotide sequence complementary to a viral RNA encoding one or more interferon agonist proteins. In one embodiment, the first region can comprise a nucleotide sequence complementary to shared or conserved RNA sequences of differing viral strains or classes or viral strains. Non-limiting examples of viruses include Hepatitis C Virus (HCV), Hepatitis B Virus (HBV), Human Immunodeficiency Virus type 1 (HIV-1), Human Immunodeficiency Virus type 2 (HIV-2), West Nile Virus (WNV), cytomegalovirus (CMV), respiratory syncytial virus (RSV), influenza virus, rhinovirus, papillomavirus (HPV), Herpes Simplex Virus (HSV), severe acute respiratory virus (SARS), and other viruses such as HTLV. Non-limiting example of interferon agonist proteins include any protein that is capable of inhibition or suppressing RNA silencing (e.g., RNA binding proteins such as E3L or NS1 or equivalents thereof, see for example Li et al., 2004, PNAS, 101, 1350-1355)

[0461] In one embodiment, a multifunctional short interfering nucleic acid (multifunctional siNA) of the invention comprises a first region and a second region, wherein the first region comprises nucleotide sequence complementary to a viral RNA and the second region comprises nucleotide sequence complementary to a cellular RNA that is involved in viral infection and/or replication. Non-limiting examples of viruses include Hepatitis C Virus (HCV), Hepatitis B Virus (HBV), Human Immunodeficiency Virus type 1 (HIV-1), Human Immunodeficiency Virus type 2 (HIV-2), West Nile Virus (WNV), cytomegalovirus (CMV), respiratory syncytial virus (RSV), influenza virus, rhinovirus, papillomavirus (HPV), Herpes Simplex Virus (HSV), severe acute respiratory virus (SARS), and other viruses such as HTLV. Non-limiting examples of cellular RNAs involved in viral infection and/or replication include cellular receptors, cell surface molecules, cellular enzymes, cellular transcription factors, and/or cytokines, second messengers, and cellular accessory molecules including, but not limited to, interferon agonist proteins (e.g., E3L or NS1 or equivalents thereof, see for example Li et al., 2004, PNAS, 101, 1350-1355), interferon regulatory factors (IRFs); cellular PKR protein kinase (PKR); human eukaryotic initiation factors 2B (e1F2B gamma and/or e1F2gamma); human DEAD Box protein (DDX3); and cellular proteins that bind to the poly(U) tract of the HCV 3′-UTR, such as polypyrimidine tract-binding protein, CD4 receptors, CXCR4 (Fusin; LESTR; NPY3R); CCR5 (CKR-5, CMKRB5); CCR3 (CC-CKR-3, CKR-3, CMKBR3); CCR2 (CCR2b, CMKBR2); CCR1 (CKR1, CMKBR1); CCR4 (CKR-4); CCR8 (ChemR1, TER1, CMKBR8); CCR9 (D6); CXCR2 (IL-8RB); STRL33 (Bonzo; TYMSTR); US28; V28 (CMKBRL1, CX3CR1, GPR13); GPR1; GPR15 (BOB); Apj (AGTRL1); ChemR23 receptors, Heparan Sulfate Proteoglycans, HSPG2; SDC2; SDC4; GPC1; SDC3; SDC1; Galactoceramides; Erythrocyte-expressed Glycolipids; N-myristoyltransferase (NMT, NMT2); Glycosylation Enzymes; gp-160 Processing Enzymes (PCSK5); Ribonucleotide Reductase; Polyamine Biosynthesis enzymes; SP-1; NF-kappa B (NFKB2, RELA, and NFKB1); Tumor Necrosis Factor-alpha (TNF-alpha); Interleukin 1 alpha (IL-1 alpha); Interleukin 6 (IL-6); Phospholipase C (PLC); Protein Kinase C (PKC), Cyclophilins, (PPID, PPIA, PPIE, PPIB, PPIF, PPIG, and PPIC); Mitogen Activated Protein Kinase (MAP-Kinase, MAPK1); and Extracellular Signal-Regulated Kinase (ERK-Kinase), (see for example Schang, 2002, Journal of Antimicrobial Chemotherapy, 50, 779-792 and Ludwig et al., 2003, Trends. Mol. Med., 9, 46-52).

[0462] In one embodiment, a double stranded multifunctional siNA molecule of the invention comprises a structure having Formula MF-I:

5′-p-X Z X′-3′

3′-Y′ Z Y-p-5′

wherein each 5′-p-XZX′-3′ and 5′-p-YZY′-3′ are independently an oligonucleotide of length between about 20 nucleotides and about 300 nucleotides, preferably between about 20 and about 200 nucleotides, about 20 and about 100 nucleotides, about 20 and about 40 nucleotides, about 20 and about 40 nucleotides, about 24 and about 38 nucleotides, or about 26 and about 38 nucleotides; XZ comprises a nucleic acid sequence that is complementary to a first target nucleic acid sequence; YZ is an oligonucleotide comprising nucleic acid sequence that is complementary to a second target nucleic acid sequence; Z comprises nucleotide sequence of length about 1 to about 24 nucleotides (e.g., about 1, 2, 3, 4, 5, 6, 7, 8, 9, 10, 11, 12, 13, 14, 15, 16, 17, 18, 19, 20, 21, 22, 23, or 24 nucleotides) that is self complimentary; X comprises nucleotide sequence of length about 1 to about 100 nucleotides, preferably about 1 to about 21 nucleotides (e.g., about 1, 2, 3, 4, 5, 6, 7, 8, 9, 10, 11, 12, 13, 14, 15, 16, 17, 18, 19, 20, or 21 nucleotides) that is complementary to nucleotide sequence present in region Y′; Y comprises nucleotide sequence of length about 1 to about 100 nucleotides, preferably about 1- about 21 nucleotides (e.g., about 1, 2, 3, 4, 5, 6, 7, 8, 9, 10, 11, 12, 13, 14, 15, 16, 17, 18, 19, 20 or 21 nucleotides) that is complementary to nucleotide sequence present in region X′; each p comprises a terminal phosphate group that is independently present or absent; each XZ and YZ is independently of length sufficient to stably interact (i.e., base pair) with the first and second target nucleic acid sequence, respectively, or a portion thereof. For example, each sequence X and Y can independently comprise sequence from about 12 to about 21 or more nucleotides in length (e.g., about 12, 13, 14, 15, 16, 17, 18, 19, 20, 21, or more) that is complementary to a target nucleotide sequence in different target nucleic acid molecules, such as target RNAs or a portion thereof. In another non-limiting example, the length of the nucleotide sequence of X and Z together that is complementary to the first target nucleic acid sequence (e.g., RNA) or a portion thereof is from about 12 to about 21 or more nucleotides (e.g., about 12, 13, 14, 15, 16, 17, 18, 19, 20, 21, or more). In another non-limiting example, the length of the nucleotide sequence of Y and Z together, that is complementary to the second target nucleic acid sequence (e.g., RNA) or a portion thereof is from about 12 to about 21 or more nucleotides (e.g., about 12, 13, 14, 15, 16, 17, 18, 19, 20, 21, or more). In one embodiment, the first target nucleic acid sequence and the second target nucleic acid sequence are present in the same target nucleic acid molecule. In another embodiment, the first target nucleic acid sequence and the second target nucleic acid sequence are present in different target nucleic acid molecules. In one embodiment, Z comprises a palindrome or a repeat sequence. In one embodiment, the lengths of oligonucleotides X and X′ are identical. In another embodiment, the lengths of oligonucleotides X and X′ are not identical. In one embodiment, the lengths of oligonucleotides Y and Y′ are identical. In another embodiment, the lengths of oligonucleotides Y and Y′ are not identical. In one embodiment, the double stranded oligonucleotide construct of Formula I(a) includes one or more, specifically 1, 2, 3 or 4, mismatches, to the extent such mismatches do not significantly diminish the ability of the double stranded oligonucleotide to inhibit target gene expression.

[0463] In one embodiment, a multifunctional siNA molecule of the invention comprises a structure having Formula MF-II:

5′-p-X X′-3′

3′-Y′ Y-p-5′

wherein each 5′-p-XX′-3′ and 5′-p-YY′-3′ are independently an oligonucleotide of length between about 20 nucleotides and about 300 nucleotides, preferably between about 20 and about 200 nucleotides, about 20 and about 100 nucleotides, about 20 and about 40 nucleotides, about 20 and about 40 nucleotides, about 24 and about 38 nucleotides, or about 26 and about 38 nucleotides; X comprises a nucleic acid sequence that is complementary to a first target nucleic acid sequence; Y is an oligonucleotide comprising nucleic acid sequence that is complementary to a second target nucleic acid sequence; X comprises a nucleotide sequence of length about 1 to about 100 nucleotides, preferably about 1 to about 21 nucleotides (e.g., about 1, 2, 3, 4, 5, 6, 7, 8, 9, 10, 11, 12, 13, 14, 15, 16, 17, 18, 19, 20, or 21 nucleotides) that is complementary to nucleotide sequence present in region Y′; Y comprises nucleotide sequence of length about 1 to about 100 nucleotides, preferably about 1 to about 21 nucleotides (e.g., about 1, 2, 3, 4, 5, 6, 7, 8, 9, 10, 11, 12, 13, 14, 15, 16, 17, 18, 19, 20 or 21 nucleotides) that is complementary to nucleotide sequence present in region X′; each p comprises a terminal phosphate group that is independently present or absent; each X and Y independently is of length sufficient to stably interact (i.e., base pair) with the first and second target nucleic acid sequence, respectively, or a portion thereof. For example, each sequence X and Y can independently comprise sequence from about 12 to about 21 or more nucleotides in length (e.g., about 12, 13, 14, 15, 16, 17, 18, 19, 20, 21, or more) that is complementary to a target nucleotide sequence in different target nucleic acid molecules, such as target RNAs or a portion thereof. In one embodiment, the first target nucleic acid sequence and the second target nucleic acid sequence are present in the same target nucleic acid molecule. In another embodiment, the first target nucleic acid sequence and the second target nucleic acid sequence are present in different target nucleic acid molecules. In one embodiment, Z comprises a palindrome or a repeat sequence. In one embodiment, the lengths of oligonucleotides X and X′ are identical. In another embodiment, the lengths of oligonucleotides X and X′ are not identical. In one embodiment, the lengths of oligonucleotides Y and Y′ are identical. In another embodiment, the lengths of oligonucleotides Y and Y′ are not identical. In one embodiment, the double stranded oligonucleotide construct of Formula I(a) includes one or more, specifically 1, 2, 3 or 4, mismatches, to the extent such mismatches do not significantly diminish the ability of the double stranded oligonucleotide to inhibit target gene expression.

[0464] In one embodiment, a multifunctional siNA molecule of the invention comprises a structure having Formula MF-III:

X X′

Y′—W—Y

wherein each X, X′, Y, and Y′ is independently an oligonucleotide of length between about 15 nucleotides and about 50 nucleotides, preferably between about 18 and about 40 nucleotides, or about 19 and about 23 nucleotides; X comprises nucleotide sequence that is complementary to nucleotide sequence present in region Y′; X′ comprises nucleotide sequence that is complementary to nucleotide sequence present in region Y; each X and X′ is independently of length sufficient to stably interact (i.e., base pair) with a first and a second target nucleic acid sequence, respectively, or a portion thereof; W represents a nucleotide or non-nucleotide linker that connects sequences Y′ and Y; and the multifunctional siNA directs cleavage of the first and second target sequence via RNA interference. In one embodiment, region W connects the 3′-end of sequence Y′ with the 3′-end of sequence Y. In one embodiment, region W connects the 3′-end of sequence Y′ with the 5′-end of sequence Y. In one embodiment, region W connects the 5′-end of sequence Y′ with the 5′-end of sequence Y. In one embodiment, region W connects the 5′-end of sequence Y′ with the 3′-end of sequence Y. In one embodiment, a terminal phosphate group is present at the 5′-end of sequence X. In one embodiment, a terminal phosphate group is present at the 5′-end of sequence X′. In one embodiment, a terminal phosphate group is present at the 5′-end of sequence Y. In one embodiment, a terminal phosphate group is present at the 5′-end of sequence Y′. In one embodiment, W connects sequences Y and Y′ via a biodegradable linker. In one embodiment, W further comprises a conjugate, label, aptamer, ligand, lipid, or polymer.

[0465] In one embodiment, a multifunctional siNA molecule of the invention comprises a structure having Formula MF-W:

X X′

Y′—W—Y

wherein each X, X′, Y, and Y′ is independently an oligonucleotide of length between about 15 nucleotides and about 50 nucleotides, preferably between about 18 and about 40 nucleotides, or about 19 and about 23 nucleotides; X comprises nucleotide sequence that is complementary to nucleotide sequence present in region Y′; X′ comprises nucleotide sequence that is complementary to nucleotide sequence present in region Y; each Y and Y′ is independently of length sufficient to stably interact (i.e., base pair) with a first and a second target nucleic acid sequence, respectively, or a portion thereof; W represents a nucleotide or non-nucleotide linker that connects sequences Y′ and Y; and the multifunctional siNA directs cleavage of the first and second target sequence via RNA interference. In one embodiment, region W connects the 3′-end of sequence Y′ with the 3′-end of sequence Y. In one embodiment, region W connects the 3′-end of sequence Y′ with the 5′-end of sequence Y. In one embodiment, region W connects the 5′-end of sequence Y′ with the 5′-end of sequence Y. In one embodiment, region W connects the 5′-end of sequence Y′ with the 3′-end of sequence Y. In one embodiment, a terminal phosphate group is present at the 5′-end of sequence X. In one embodiment, a terminal phosphate group is present at the 5′-end of sequence X′. In one embodiment, a terminal phosphate group is present at the 5′-end of sequence Y. In one embodiment, a terminal phosphate group is present at the 5′-end of sequence Y′. In one embodiment, W connects sequences Y and Y′ via a biodegradable linker. In one embodiment, W further comprises a conjugate, label, aptamer, ligand, lipid, or polymer.

[0466] In one embodiment, a multifunctional siNA molecule of the invention comprises a structure having Formula MF-V:

X X′

Y′—W—Y

wherein each X, X′, Y, and Y′ is independently an oligonucleotide of length between about 15 nucleotides and about 50 nucleotides, preferably between about 18 and about 40 nucleotides, or about 19 and about 23 nucleotides; X comprises nucleotide sequence that is complementary to nucleotide sequence present in region Y′; X′ comprises nucleotide sequence that is complementary to nucleotide sequence present in region Y; each X, X′, Y, or Y′ is independently of length sufficient to stably interact (i.e., base pair) with a first, second, third, or fourth target nucleic acid sequence, respectively, or a portion thereof; W represents a nucleotide or non-nucleotide linker that connects sequences Y′ and Y; and the multifunctional siNA directs cleavage of the first, second, third, and/or fourth target sequence via RNA interference. In one embodiment, region W connects the 3′-end of sequence Y′ with the 3′-end of sequence Y. In one embodiment, region W connects the 3′-end of sequence Y′ with the 5′-end of sequence Y. In one embodiment, region W connects the 5′-end of sequence Y′ with the 5′-end of sequence Y. In one embodiment, region W connects the 5′-end of sequence Y′ with the 3′-end of sequence Y. In one embodiment, a terminal phosphate group is present at the 5′-end of sequence X. In one embodiment, a terminal phosphate group is present at the 5′-end of sequence X′. In one embodiment, a terminal phosphate group is present at the 5′-end of sequence Y. In one embodiment, a terminal phosphate group is present at the 5′-end of sequence Y′. In one embodiment, W connects sequences Y and Y′ via a biodegradable linker. In one embodiment, W further comprises a conjugate, label, aptamer, ligand, lipid, or polymer.

[0467] In one embodiment, regions X and Y of multifunctional siNA molecule of the invention (e.g., having any of Formula MF-I-MF-V), are complementary to different target nucleic acid sequences that are portions of the same target nucleic acid molecule. In one embodiment, such target nucleic acid sequences are at different locations within the coding region of a RNA transcript. In one embodiment, such target nucleic acid sequences comprise coding and non-coding regions of the same RNA transcript. In one embodiment, such target nucleic acid sequences comprise regions of alternately spliced transcripts or precursors of such alternately spliced transcripts.

[0468] In one embodiment, a multifunctional siNA molecule having any of Formula MF-I-MF-V can comprise chemical modifications as described herein without limitation, such as, for example, nucleotides having any of Formulae I-VII described herein, stabilization chemistries as described in Table IV, or any other combination of modified nucleotides and non-nucleotides as described in the various embodiments herein.

[0469] In one embodiment, the palidrome or repeat sequence or modified nucleotide (e.g., nucleotide with a modified base, such as 2-amino purine or a universal base) in Z of multifunctional siNA constructs having Formula MF-I or MF-II comprises chemically modified nucleotides that are able to interact with a portion of the target nucleic acid sequence (e.g., modified base analogs that can form Watson Crick base pairs or non-Watson Crick base pairs).

[0470] In one embodiment, a multifunctional siNA molecule of the invention, for example each strand of a multifunctional siNA having MF-I-MF-V, independently comprises about 15 to about 40 nucleotides (e.g., about 15, 16, 17, 18, 19, 20, 21, 22, 23, 24, 25, 26, 27, 28, 29, 30, 31, 32, 33, 34, 35, 36, 37, 38, 39, or 40 nucleotides). In one embodiment, a multifunctional siNA molecule of the invention comprises one or more chemical modifications. In a non-limiting example, the introduction of chemically modified nucleotides and/or non-nucleotides into nucleic acid molecules of the invention provides a powerful tool in overcoming potential limitations of in vivo stability and bioavailability inherent to unmodified RNA molecules that are delivered exogenously. For example, the use of chemically modified nucleic acid molecules can enable a lower dose of a particular nucleic acid molecule for a given therapeutic effect since chemically modified nucleic acid molecules tend to have a longer half-life in serum or in cells or tissues. Furthermore, certain chemical modifications can improve the bioavailability and/or potency of nucleic acid molecules by not only enhancing half-life but also facilitating the targeting of nucleic acid molecules to particular organs, cells or tissues and/or improving cellular uptake of the nucleic acid molecules. Therefore, even if the activity of a chemically modified nucleic acid molecule is reduced in vitro as compared to a native/unmodified nucleic acid molecule, for example when compared to an unmodified RNA molecule, the overall activity of the modified nucleic acid molecule can be greater than the native or unmodified nucleic acid molecule due to improved stability, potency, duration of effect, bioavailability and/or delivery of the molecule.

[0471] In another embodiment, the invention features multifunctional siNAs, wherein the multifunctional siNAs are assembled from two separate double-stranded siNAs, with one of the ends of each sense strand is tethered to the end of the sense strand of the other siNA molecule, such that the two antisense siNA strands are annealed to their corresponding sense strand that are tethered to each other at one end (see FIG. 112). The tethers or linkers can be nucleotide-based linkers or non-nucleotide based linkers as generally known in the art and as described herein.

[0472] In one embodiment, the invention features a multifunctional siNA, wherein the multifunctional siNA is assembled from two separate double-stranded siNAs, with the 5′-end of one sense strand of the siNA is tethered to the 5′-end of the sense strand of the other siNA molecule, such that the 5′-ends of the two antisense siNA strands, annealed to their corresponding sense strand that are tethered to each other at one end, point away (in the opposite direction) from each other (see FIG. 112(A)). The tethers or linkers can be nucleotide-based linkers or non-nucleotide based linkers as generally known in the art and as described herein.

[0473] In one embodiment, the invention features a multifunctional siNA, wherein the multifunctional siNA is assembled from two separate double-stranded siNAs, with the 3′-end of one sense strand of the siNA is tethered to the 3′-end of the sense strand of the other siNA molecule, such that the 5′-ends of the two antisense siNA strands, annealed to their corresponding sense strand that are tethered to each other at one end, face each other (see FIG. 112(B)). The tethers or linkers can be nucleotide-based linkers or non nucleotide based linkers as generally known in the art and as described herein.

[0474] In one embodiment, the invention features a multifunctional siNA, wherein the multifunctional siNA is assembled from two separate double-stranded siNAs, with the 5′-end of one sense strand of the siNA is tethered to the 3′-end of the sense strand of the other siNA molecule, such that the 5′-end of the one of the antisense siNA strands annealed to their corresponding sense strand that are tethered to each other at one end, faces the 3′-end of the other antisense strand (see FIG. 112(C-D)). The tethers or linkers can be nucleotide-based linkers or non-nucleotide based linkers as generally known in the art and as described herein.

[0475] In one embodiment, the invention features a multifunctional siNA, wherein the multifunctional siNA is assembled from two separate double-stranded siNAs, with the 5′-end of one antisense strand of the siNA is tethered to the 3′-end of the antisense strand of the other siNA molecule, such that the 5′-end of the one of the sense siNA strands annealed to their corresponding antisense sense strand that are tethered to each other at one end, faces the 3′-end of the other sense strand (see FIG. 112(G-H)). In one embodiment, the linkage between the 5′-end of the first antisense strand and the 3′-end of the second antisense strand is designed in such a way as to be readily cleavable (e.g., biodegradable linker) such that the 5′end of each antisense strand of the multifunctional siNA has a free 5′-end suitable to mediate RNA interference-based cleavage of the target RNA. The tethers or linkers can be nucleotide-based linkers or non-nucleotide based linkers as generally known in the art and as described herein.

[0476] In one embodiment, the invention features a multifunctional siNA, wherein the multifunctional siNA is assembled from two separate double-stranded siNAs, with the 5′-end of one antisense strand of the siNA is tethered to the 5′-end of the antisense strand of the other siNA molecule, such that the 3′-end of the one of the sense siNA strands annealed to their corresponding antisense sense strand that are tethered to each other at one end, faces the 3′-end of the other sense strand (see FIG. 112(E)). In one embodiment, the linkage between the 5′-end of the first antisense strand and the 5′-end of the second antisense strand is designed in such a way as to be readily cleavable (e.g., biodegradable linker) such that the 5′end of each antisense strand of the multifunctional siNA has a free 5′-end suitable to mediate RNA interference-based cleavage of the target RNA. The tethers or linkers can be nucleotide-based linkers or non-nucleotide based linkers as generally known in the art and as described herein.

[0477] In one embodiment, the invention features a multifunctional siNA, wherein the multifunctional siNA is assembled from two separate double-stranded siNAs, with the 3′-end of one antisense strand of the siNA is tethered to the 3′-end of the antisense strand of the other siNA molecule, such that the 5′-end of the one of the sense siNA strands annealed to their corresponding antisense sense strand that are tethered to each other at one end, faces the 3′-end of the other sense strand (see FIG. 112(F)). In one embodiment, the linkage between the 5′-end of the first antisense strand and the 5′-end of the second antisense strand is designed in such a way as to be readily cleavable (e.g., biodegradable linker) such that the 5′end of each antisense strand of the multifunctional siNA has a free 5′-end suitable to mediate RNA interference-based cleavage of the target RNA. The tethers or linkers can be nucleotide-based linkers or non-nucleotide based linkers as generally known in the art and as described herein.

[0478] There are several potential advantages and variations to this multifunctional approach. For example, when used in combination with target sites having homology, siNAs that target a sequence present in two genes (e.g. Flt-1 site 3646, which targets VEGF-R1 and R2), the design can be used to target more than two sites. A single multifunctional siNA can be for example, used to target VEGF R1 RNA and VEGF R2 RNA (using one antisense strand of the multifunctional siNA targeting of conserved sequence between to the two RNAs) and VEGF RNA (using the second antisense strand of the multifunctional siNA targeting VEGF RNA. This approach allows targeting of the cytokines and the two main receptors using a single multifunctional siNA.

### Synthesis of Nucleic Acid Molecules

[0479] Synthesis of nucleic acids greater than 100 nucleotides in length is difficult using automated methods, and the therapeutic cost of such molecules is prohibitive. In this invention, small nucleic acid motifs (“small” refers to nucleic acid motifs no more than 100 nucleotides in length, preferably no more than 80 nucleotides in length, and most preferably no more than 50 nucleotides in length; e.g., individual siNA oligonucleotide sequences or siNA sequences synthesized in tandem) are preferably used for exogenous delivery. The simple structure of these molecules increases the ability of the nucleic acid to invade targeted regions of protein and/or RNA structure. Exemplary molecules of the instant invention are chemically synthesized, and others can similarly be synthesized.

[0480] Oligonucleotides (e.g., certain modified oligonucleotides or portions of oligonucleotides lacking ribonucleotides) are synthesized using protocols known in the art, for example as described in Caruthers et al., 1992, Methods in Enzymology 211, 3-19, Thompson et al., International PCT Publication No. WO 99/54459, Wincott et al., 1995, Nucleic Acids Res. 23, 2677-2684, Wincott et al., 1997, Methods Mol. Bio., 74, 59, Brennan et al., 1998, Biotechnol Bioeng., 61, 33-45, and Brennan, U.S. Pat. No. 6,001,311. All of these references are incorporated herein by reference. The synthesis of oligonucleotides makes use of common nucleic acid protecting and coupling groups, such as dimethoxytrityl at the 5′-end, and phosphoramidites at the 3′-end. In a non-limiting example, small scale syntheses are conducted on a 394 Applied Biosystems, Inc. synthesizer using a 0.2 μmol scale protocol with a 2.5 min coupling step for 2′-O-methylated nucleotides and a 45 second coupling step for 2′-deoxy nucleotides or 2′-deoxy-2′-fluoro nucleotides. Table V outlines the amounts and the contact times of the reagents used in the synthesis cycle. Alternatively, syntheses at the 0.2 μmol scale can be performed on a 96-well plate synthesizer, such as the instrument produced by Protogene (Palo Alto, Calif.) with minimal modification to the cycle. A 33-fold excess (60 μL of 0.11 M=6.6 μmol) of 2′-O-methyl phosphoramidite and a 105-fold excess of S-ethyl tetrazole (60 μL of 0.25 M=15 μmol) can be used in each coupling cycle of 2′-O-methyl residues relative to polymer-bound 5′-hydroxyl. A 22-fold excess (40 μL of 0.11 M=4.4 μmol) of deoxy phosphoramidite and a 70-fold excess of S-ethyl tetrazole (40 μL of 0.25 M=10 μmol) can be used in each coupling cycle of deoxy residues relative to polymer-bound 5′-hydroxyl. Average coupling yields on the 394 Applied Biosystems, Inc. synthesizer, determined by colorimetric quantitation of the trityl fractions, are typically 97.5-99%. Other oligonucleotide synthesis reagents for the 394 Applied Biosystems, Inc. synthesizer include the following: detritylation solution is 3% TCA in methylene chloride (ABI); capping is performed with 16% N-methyl imidazole in THF (ABI) and 10% acetic anhydride/10% 2,6-lutidine in THF (ABI); and oxidation solution is 16.9 mM I₂, 49 mM pyridine, 9% water in THF (PERSEPTIVE™). Burdick & Jackson Synthesis Grade acetonitrile is used directly from the reagent bottle. S-Ethyltetrazole solution (0.25 M in acetonitrile) is made up from the solid obtained from American International Chemical, Inc. Alternately, for the introduction of phosphorothioate linkages, Beaucage reagent (3H-1,2-Benzodithiol-3-one 1,1-dioxide, 0.05 M in acetonitrile) is used.

[0481] Deprotection of the DNA-based oligonucleotides is performed as follows: the polymer-bound trityl-on oligoribonucleotide is transferred to a 4 mL glass screw top vial and suspended in a solution of 40% aqueous methylamine (1 mL) at 65° C. for 10 minutes. After cooling to −20° C., the supernatant is removed from the polymer support. The support is washed three times with 1.0 mL of EtOH:MeCN:H2O/3:1:1, vortexed and the supernatant is then added to the first supernatant. The combined supernatants, containing the oligoribonucleotide, are dried to a white powder.

[0482] The method of synthesis used for RNA including certain siNA molecules of the invention follows the procedure as described in Usman et al., 1987, J. Am. Chem. Soc., 109, 7845; Scaringe et al., 1990, Nucleic Acids Res., 18, 5433; and Wincott et al., 1995, Nucleic Acids Res. 23, 2677-2684 Wincott et al., 1997, Methods Mol. Bio., 74, 59, and makes use of common nucleic acid protecting and coupling groups, such as dimethoxytrityl at the 5′-end, and phosphoramidites at the 3′-end. In a non-limiting example, small scale syntheses are conducted on a 394 Applied Biosystems, Inc. synthesizer using a 0.2 μmol scale protocol with a 7.5 min coupling step for alkylsilyl protected nucleotides and a 2.5 min coupling step for 2′-O-methylated nucleotides. Table V outlines the amounts and the contact times of the reagents used in the synthesis cycle. Alternatively, syntheses at the 0.2 μmol scale can be done on a 96-well plate synthesizer, such as the instrument produced by Protogene (Palo Alto, Calif.) with minimal modification to the cycle. A 33-fold excess (60 μL of 0.11 M=6.6 μmol) of 2′-O-methyl phosphoramidite and a 75-fold excess of S-ethyl tetrazole (60 μL of 0.25 M=15 μmol) can be used in each coupling cycle of 2′-O-methyl residues relative to polymer-bound 5′-hydroxyl. A 66-fold excess (120 μL of 0.11 M=13.2 μmol) of alkylsilyl (ribo) protected phosphoramidite and a 150-fold excess of S-ethyl tetrazole (120 μL of 0.25 M=30 μmol) can be used in each coupling cycle of ribo residues relative to polymer-bound 5′-hydroxyl. Average coupling yields on the 394 Applied Biosystems, Inc. synthesizer, determined by colorimetric quantitation of the trityl fractions, are typically 97.5-99%. Other oligonucleotide synthesis reagents for the 394 Applied Biosystems, Inc. synthesizer include the following: detritylation solution is 3% TCA in methylene chloride (ABI); capping is performed with 16% N-methyl imidazole in THF (ABI) and 10% acetic anhydride/10% 2,6-lutidine in THF (ABI); oxidation solution is 16.9 mM I₂, 49 mM pyridine, 9% water in THF (PERSEPTIVE™). Burdick & Jackson Synthesis Grade acetonitrile is used directly from the reagent bottle. S-Ethyltetrazole solution (0.25 M in acetonitrile) is made up from the solid obtained from American International Chemical, Inc. Alternately, for the introduction of phosphorothioate linkages, Beaucage reagent (3H-1,2-Benzodithiol-3-one 1,1-dioxide0.05 M in acetonitrile) is used.

[0483] Deprotection of the RNA is performed using either a two-pot or one-pot protocol. For the two-pot protocol, the polymer-bound trityl-on oligoribonucleotide is transferred to a 4 mL glass screw top vial and suspended in a solution of 40% aq. methylamine (1 mL) at 65° C. for 10 minutes. After cooling to −20° C., the supernatant is removed from the polymer support. The support is washed three times with 1.0 mL of EtOH:MeCN:H2O/3:1:1, vortexed and the supernatant is then added to the first supernatant. The combined supernatants, containing the oligoribonucleotide, are dried to a white powder. The base deprotected oligoribonucleotide is resuspended in anhydrous TEA/HF/NMP solution (300 μL of a solution of 1.5 mL N-methylpyrrolidinone, 750 μL TEA and 1 mL TEA.3HF to provide a 1.4 M HF concentration) and heated to 65° C. After 1.5 h, the oligomer is quenched with 1.5 M NH₄HCO₃.

[0484] Alternatively, for the one-pot protocol, the polymer-bound trityl-on oligoribonucleotide is transferred to a 4 mL glass screw top vial and suspended in a solution of 33% ethanolic methylamine/DMSO: 1/1 (0.8 mL) at 65° C. for 15 minutes. The vial is brought to room temperature TEA.3HF (0.1 mL) is added and the vial is heated at 65° C. for 15 minutes. The sample is cooled at −20° C. and then quenched with 1.5 M NH₄HCO₃.

[0485] For purification of the trityl-on oligomers, the quenched NH₄HCO₃ solution is loaded onto a C-18 containing cartridge that had been prewashed with acetonitrile followed by 50 mM TEAA. After washing the loaded cartridge with water, the RNA is detritylated with 0.5% TFA for 13 minutes. The cartridge is then washed again with water, salt exchanged with 1 M NaCl and washed with water again. The oligonucleotide is then eluted with 30% acetonitrile.

[0486] The average stepwise coupling yields are typically >98% (Wincott et al., 1995 Nucleic Acids Res. 23, 2677-2684). Those of ordinary skill in the art will recognize that the scale of synthesis can be adapted to be larger or smaller than the example described above including but not limited to 96-well format.

[0487] Alternatively, the nucleic acid molecules of the present invention can be synthesized separately and joined together post-synthetically, for example, by ligation (Moore et al., 1992, Science 256, 9923; Draper et al., International PCT publication No. WO 93/23569; Shabarova et al., 1991, Nucleic Acids Research 19, 4247; Bellon et al., 1997, Nucleosides & Nucleotides, 16, 951; Bellon et al., 1997, Bioconjugate Chem. 8, 204), or by hybridization following synthesis and/or deprotection.

[0488] The siNA molecules of the invention can also be synthesized via a tandem synthesis methodology as described in Example 1 herein, wherein both siNA strands are synthesized as a single contiguous oligonucleotide fragment or strand separated by a cleavable linker which is subsequently cleaved to provide separate siNA fragments or strands that hybridize and permit purification of the siNA duplex. The linker can be a polynucleotide linker or a non-nucleotide linker. The tandem synthesis of siNA as described herein can be readily adapted to both multiwell/multiplate synthesis platforms such as 96 well or similarly larger multi-well platforms. The tandem synthesis of siNA as described herein can also be readily adapted to large scale synthesis platforms employing batch reactors, synthesis columns and the like.

[0489] A siNA molecule can also be assembled from two distinct nucleic acid strands or fragments wherein one fragment includes the sense region and the second fragment includes the antisense region of the RNA molecule.

[0490] The nucleic acid molecules of the present invention can be modified extensively to enhance stability by modification with nuclease resistant groups, for example, 2′-amino, 2′-C-allyl, 2′-fluoro, 2′-O-methyl, 2′-H (for a review see Usman and Cedergren, 1992, TIBS 17, 34; Usman et al., 1994, Nucleic Acids Symp. Ser. 31, 163). siNA constructs can be purified by gel electrophoresis using general methods or can be purified by high pressure liquid chromatography (HPLC; see Wincott et al., supra, the totality of which is hereby incorporated herein by reference) and re-suspended in water.

[0491] In another aspect of the invention, siNA molecules of the invention are expressed from transcription units inserted into DNA or RNA vectors. The recombinant vectors can be DNA plasmids or viral vectors. siNA expressing viral vectors can be constructed based on, but not limited to, adeno-associated virus, retrovirus, adenovirus, or alphavirus. The recombinant vectors capable of expressing the siNA molecules can be delivered as described herein, and persist in target cells. Alternatively, viral vectors can be used that provide for transient expression of siNA molecules.

### Optimizing Activity of the Nucleic Acid Molecule of the Invention.

[0492] Chemically synthesizing nucleic acid molecules with modifications (base, sugar and/or phosphate) can prevent their degradation by serum ribonucleases, which can increase their potency (see e.g., Eckstein et al., International Publication No. WO 92/07065; Perrault et al., 1990 Nature 344, 565; Pieken et al., 1991, Science 253, 314; Usman and Cedergren, 1992, Trends in Biochem. Sci. 17, 334; Usman et al., International Publication No. WO 93/15187; and Rossi et al., International Publication No. WO 91/03162; Sproat, U.S. Pat. No. 5,334,711; Gold et al., U.S. Pat. No. 6,300,074; and Burgin et al., supra; all of which are incorporated by reference herein). All of the above references describe various chemical modifications that can be made to the base, phosphate and/or sugar moieties of the nucleic acid molecules described herein. Modifications that enhance their efficacy in cells, and removal of bases from nucleic acid molecules to shorten oligonucleotide synthesis times and reduce chemical requirements are desired.

[0493] There are several examples in the art describing sugar, base and phosphate modifications that can be introduced into nucleic acid molecules with significant enhancement in their nuclease stability and efficacy. For example, oligonucleotides are modified to enhance stability and/or enhance biological activity by modification with nuclease resistant groups, for example, 2′-amino, 2′-C-allyl, 2′-fluoro, 2′-O-methyl, 2′-O-allyl, 2′-H, nucleotide base modifications (for a review see Usman and Cedergren, 1992, TIBS. 17, 34; Usman et al., 1994, Nucleic Acids Symp. Ser. 31, 163; Burgin et al., 1996, Biochemistry, 35, 14090). Sugar modification of nucleic acid molecules have been extensively described in the art (see Eckstein et al., International Publication PCT No. WO 92/07065; Perrault et al. Nature, 1990, 344, 565-568; Pieken et al. Science, 1991, 253, 314-317; Usman and Cedergren, Trends in Biochem. Sci., 1992, 17, 334-339; Usman et al. International Publication PCT No. WO 93/15187; Sproat, U.S. Pat. No. 5,334,711 and Beigelman et al., 1995, J. Biol. Chem., 270, 25702; Beigelman et al., International PCT publication No. WO 97/26270; Beigelman et al., U.S. Pat. No. 5,716,824; Usman et al., U.S. Pat. No. 5,627,053; Woolf et al., International PCT Publication No. WO 98/13526; Thompson et al., U.S. Ser. No. 60/082,404 which was filed on Apr. 20, 1998; Karpeisky et al., 1998, Tetrahedron Lett., 39, 1131; Earnshaw and Gait, 1998, Biopolymers (Nucleic Acid Sciences), 48, 39-55; Verma and Eckstein, 1998, Annu. Rev. Biochem., 67, 99-134; and Burlina et al., 1997, Bioorg. Med. Chem., 5, 1999-2010; all of the references are hereby incorporated in their totality by reference herein). Such publications describe general methods and strategies to determine the location of incorporation of sugar, base and/or phosphate modifications and the like into nucleic acid molecules without modulating catalysis, and are incorporated by reference herein. In view of such teachings, similar modifications can be used as described herein to modify the siNA nucleic acid molecules of the instant invention so long as the ability of siNA to promote RNAi is cells is not significantly inhibited.

[0494] While chemical modification of oligonucleotide internucleotide linkages with phosphorothioate, phosphorodithioate, and/or 5′-methylphosphonate linkages improves stability, excessive modifications can cause some toxicity or decreased activity. Therefore, when designing nucleic acid molecules, the amount of these internucleotide linkages should be minimized. The reduction in the concentration of these linkages should lower toxicity, resulting in increased efficacy and higher specificity of these molecules.

[0495] Short interfering nucleic acid (siNA) molecules having chemical modifications that maintain or enhance activity are provided. Such a nucleic acid is also generally more resistant to nucleases than an unmodified nucleic acid. Accordingly, the in vitro and/or in vivo activity should not be significantly lowered. In cases in which modulation is the goal, therapeutic nucleic acid molecules delivered exogenously should optimally be stable within cells until translation of the target RNA has been modulated long enough to reduce the levels of the undesirable protein. This period of time varies between hours to days depending upon the disease state. Improvements in the chemical synthesis of RNA and DNA (Wincott et al., 1995, Nucleic Acids Res. 23, 2677; Caruthers et al., 1992, Methods in Enzymology 211,3-19 (incorporated by reference herein)) have expanded the ability to modify nucleic acid molecules by introducing nucleotide modifications to enhance their nuclease stability, as described above.

[0496] In one embodiment, nucleic acid molecules of the invention include one or more (e.g., about 1, 2, 3, 4, 5, 6, 7, 8, 9, 10, or more) G-clamp nucleotides. A G-clamp nucleotide is a modified cytosine analog wherein the modifications confer the ability to hydrogen bond both Watson-Crick and Hoogsteen faces of a complementary guanine within a duplex, see for example Lin and Matteucci, 1998, J. Am. Chem. Soc., 120, 8531-8532. A single G-clamp analog substitution within an oligonucleotide can result in substantially enhanced helical thermal stability and mismatch discrimination when hybridized to complementary oligonucleotides. The inclusion of such nucleotides in nucleic acid molecules of the invention results in both enhanced affinity and specificity to nucleic acid targets, complementary sequences, or template strands. In another embodiment, nucleic acid molecules of the invention include one or more (e.g., about 1, 2, 3, 4, 5, 6, 7, 8, 9, 10, or more) LNA “locked nucleic acid” nucleotides such as a 2′,4′-C methylene bicyclo nucleotide (see for example Wengel et al., International PCT Publication No. WO 00/66604 and WO 99/14226).

[0497] In another embodiment, the invention features conjugates and/or complexes of siNA molecules of the invention. Such conjugates and/or complexes can be used to facilitate delivery of siNA molecules into a biological system, such as a cell. The conjugates and complexes provided by the instant invention can impart therapeutic activity by transferring therapeutic compounds across cellular membranes, altering the pharmacokinetics, and/or modulating the localization of nucleic acid molecules of the invention. The present invention encompasses the design and synthesis of novel conjugates and complexes for the delivery of molecules, including, but not limited to, small molecules, lipids, cholesterol, phospholipids, nucleosides, nucleotides, nucleic acids, antibodies, toxins, negatively charged polymers and other polymers, for example, proteins, peptides, hormones, carbohydrates, polyethylene glycols, or polyamines, across cellular membranes. In general, the transporters described are designed to be used either individually or as part of a multi-component system, with or without degradable linkers. These compounds are expected to improve delivery and/or localization of nucleic acid molecules of the invention into a number of cell types originating from different tissues, in the presence or absence of serum (see Sullenger and Cech, U.S. Pat. No. 5,854,038). Conjugates of the molecules described herein can be attached to biologically active molecules via linkers that are biodegradable, such as biodegradable nucleic acid linker molecules.

[0498] In one embodiment, the invention features a compound having Formula 1:

[chemical structure]

[0499] wherein each R₁, R₃, R₄, R₅, R₆, R₇ and R₈ is independently hydrogen, alkyl, substituted alkyl, aryl, substituted aryl, or a protecting group, each “n” is independently an integer from 0 to about 200, R₁₂ is a straight or branched chain alkyl, substituted alkyl, aryl, or substituted aryl, and R₂ is a siNA molecule or a portion thereof.

[0500] In one embodiment, the invention features a compound having Formula 2:

[chemical structure]

[0501] wherein each R₃, R₄, R₅, R₆ and R₇ is independently hydrogen, alkyl, substituted alkyl, aryl, substituted aryl, or a protecting group, each “n” is independently an integer from 0 to about 200, R₁₂ is a straight or branched chain alkyl, substituted alkyl, aryl, or substituted aryl, and R₂ is a siNA molecule or a portion thereof.

[0502] In one embodiment, the invention features a compound having Formula 3:

[chemical structure]

[0503] wherein each R₁, R₃, R₄, R₅ R₆ and R₇ is independently hydrogen, alkyl, substituted alkyl, aryl, substituted aryl, or a protecting group, each “n” is independently an integer from 0 to about 200, R₁₂ is a straight or branched chain alkyl, substituted alkyl, aryl, or substituted aryl, and R₂ is a siNA molecule or a portion thereof.

[0504] In one embodiment, the invention features a compound having Formula 4:

[chemical structure]

[0505] wherein each R₃, R₄, R₅, R₆ and R₇ is independently hydrogen, alkyl, substituted alkyl, aryl, substituted aryl, or a protecting group, each “n” is independently an integer from 0 to about 200, R₂ is a siNA molecule or a portion thereof, and R₁₃ is an amino acid side chain.

[0506] In one embodiment, the invention features a compound having Formula 5:

[chemical structure]

[0507] wherein each R₁ and R₄ is independently a protecting group or hydrogen, each R₃, R₅, R₆, R₇ and R₈ is independently hydrogen, alkyl or nitrogen protecting group, each “n” is independently an integer from 0 to about 200, R₁₂ is a straight or branched chain alkyl, substituted alkyl, aryl, or substituted aryl, and each R₉ and R₁₀ is independently a nitrogen containing group, cyanoalkoxy, alkoxy, aryloxy, or alkyl group.

[0508] In one embodiment, the invention features a compound having Formula 6:

[chemical structure]

[0509] wherein each R₄, R₅, R₆ and R₇ is independently hydrogen, alkyl, substituted alkyl, aryl, substituted aryl, or a protecting group, R₂ is a siNA molecule or a portion thereof, each “n” is independently an integer from 0 to about 200, and L is a degradable linker.

[0510] In one embodiment, the invention features a compound having Formula 7:

[chemical structure]

[0511] wherein each R₁, R₃, R₄, R₅, R₆ and R₇ is independently hydrogen, alkyl, substituted alkyl, aryl, substituted aryl, or a protecting group, each “n” is independently an integer from 0 to about 200, R₁₂ is a straight or branched chain alkyl, substituted alkyl, aryl, or substituted aryl, and R₂ is a siNA molecule or a portion thereof.

[0512] In one embodiment, the invention features a compound having Formula 8:

[chemical structure]

[0513] wherein each R₁ and R₄ is independently a protecting group or hydrogen, each R₃, R₅, R₆ and R₇ is independently hydrogen, alkyl or nitrogen protecting group, each “n” is independently an integer from 0 to about 200, R₁₂ is a straight or branched chain alkyl, substituted alkyl, aryl, or substituted aryl, and each R₉ and R₁₀ is independently a nitrogen containing group, cyanoalkoxy, alkoxy, aryloxy, or alkyl group.

[0514] In one embodiment, R₁₃ of a compound of the invention comprises an alkylamino or an alkoxy group, for example, —CH₂O— or —CH(CH₂)CH₂O—.

[0515] In another embodiment, R₁₂ of a compound of the invention is an alkylhyrdroxyl, for example, —(CH₂)ₙOH, where n comprises an integer from about 1 to about 10.

[0516] In another embodiment, L of Formula 6 of the invention comprises serine, threonine, or a photolabile linkage.

[0517] In one embodiment, R₉ of a compound of the invention comprises a phosphorus protecting group, for example —OCH₂CH₂CN (oxyethylcyano).

[0518] In one embodiment, R₁₀ of a compound of the invention comprises a nitrogen containing group, for example, —N(R₁₄) wherein R₁₄ is a straight or branched chain alkyl having from about 1 to about 10 carbons.

[0519] In another embodiment, R₁₀ of a compound of the invention comprises a heterocycloalkyl or heterocycloalkenyl ring containing from about 4 to about 7 atoms, and having from about 1 to about 3 heteroatoms comprising oxygen, nitrogen, or sulfur.

[0520] In another embodiment, R₁ of a compound of the invention comprises an acid labile protecting group, such as a trityl or substituted trityl group, for example, a dimethoxytrityl or mono-methoxytrityl group.

[0521] In another embodiment, R₄ of a compound of the invention comprises a tent-butyl, Fm (fluorenyl-methoxy), or allyl group.

[0522] In one embodiment, R₆ of a compound of the invention comprises a TFA (trifluoracetyl) group.

[0523] In another embodiment, R₃, R₅ R₇ and R₈ of a compound of the invention are independently hydrogen.

[0524] In one embodiment, R₇ of a compound of the invention is independently isobutyryl, dimethylformamide, or hydrogen.

[0525] In another embodiment, R₁₂ of a compound of the invention comprises a methyl group or ethyl group.

[0526] In one embodiment, the invention features a compound having Formula 27:

[chemical structure]

[0527] wherein “n” is an integer from about 0 to about 20, R₄ is H or a cationic salt, X is a siNA molecule or a portion thereof, and R₂₄ is a sulfur containing leaving group, for example a group comprising:

[chemical structure]

[0528] In one embodiment, the invention features a compound having Formula 39:

[chemical structure]

[0529] wherein “n” is an integer from about 0 to about 20, X is a siNA molecule or a portion thereof, and P is a phosphorus containing group.

[0530] In another embodiment, a thiol containing linker of the invention is a compound having Formula 41:

[chemical structure]

[0531] wherein “n” is an integer from about 0 to about 20, P is a phosphorus containing group, for example a phosphine, phosphite, or phosphate, and R₂₄ is any alkyl, substituted alkyl, alkoxy, aryl, substituted aryl, alkenyl, substituted alkenyl, alkynyl, or substituted alkynyl group with or without additional protecting groups.

[0532] In one embodiment, the invention features a compound having Formula 43:

[chemical structure]

[0533] wherein X comprises a siNA molecule or portion thereof; W comprises a degradable nucleic acid linker; Y comprises a linker molecule or amino acid that can be present or absent; Z comprises H, OH, O-alkyl, SH, S-alkyl, alkyl, substituted alkyl, aryl, substituted aryl, amino, substituted amino, nucleotide, nucleoside, nucleic acid, oligonucleotide, amino acid, peptide, protein, lipid, phospholipid, or label; n is an integer from about 1 to about 100; and N′ is an integer from about 1 to about 20. In another embodiment, W is selected from the group consisting of amide, phosphate, phosphate ester, phosphoramidate, or thiophosphate ester linkage.

[0534] In another embodiment, the invention features a compound having Formula 44:

[chemical structure]

[0535] wherein X comprises a siNA molecule or portion thereof; W comprises a linker molecule or chemical linkage that can be present or absent; n is an integer from about 1 to about 50, and PEG represents a compound having Formula 45:

[chemical structure]

[0536] wherein Z comprises H, OH, O-alkyl, SH, S-alkyl, alkyl, substituted alkyl, aryl, substituted aryl, amino, substituted amino, nucleotide, nucleoside, nucleic acid, oligonucleotide, amino acid, peptide, protein, lipid, phospholipid, or label; and n is an integer from about 1 to about 100. In another embodiment, W is selected from the group consisting of amide, phosphate, phosphate ester, phosphoramidate, or thiophosphate ester linkage.

[0537] In another embodiment, the invention features a compound having Formula 46:

[chemical structure]

[0538] wherein X comprises a siNA molecule or portion thereof; each W independently comprises linker molecule or chemical linkage that can be present or absent, Y comprises a linker molecule or chemical linkage that can be present or absent; and PEG represents a compound having Formula 45:

[chemical structure]

[0539] wherein Z comprises H, OH, O-alkyl, SH, S-alkyl, alkyl, substituted alkyl, aryl, substituted aryl, amino, substituted amino, nucleotide, nucleoside, nucleic acid, oligonucleotide, amino acid, peptide, protein, lipid, phospholipid, or label; and n is an integer from about 1 to about 100. In another embodiment, W is selected from the group consisting of amide, phosphate, phosphate ester, phosphoramidate, or thiophosphate ester linkage.

[0540] In one embodiment, the invention features a compound having Formula 47:

[chemical structure]

[0541] wherein X comprises a siNA molecule or portion thereof; each W independently comprises a linker molecule or chemical linkage that can be the same or different and can be present or absent, Y comprises a linker molecule that can be present or absent; each Q independently comprises a hydrophobic group or phospholipid; each R₁, R₂, R₃, and R₄ independently comprises O, OH, H, alkyl, alkylhalo, O-alkyl, O-alkylcyano, S, S-alkyl, S-alkylcyano, N or substituted N, and n is an integer from about 1 to about 10. In another embodiment, W is selected from the group consisting of amide, phosphate, phosphate ester, phosphoramidate, or thiophosphate ester linkage.

[0542] In another embodiment, the invention features a compound having Formula 48:

[chemical structure]

[0543] wherein X comprises a siNA molecule or portion thereof; each W independently comprises a linker molecule or chemical linkage that can be present or absent, Y comprises a linker molecule that can be present or absent; each R₁, R₂, R₃, and R₄ independently comprises O, OH, H, alkyl, alkylhalo, O-alkyl, O-alkylcyano, S, S-alkyl, S-alkylcyano, N or substituted N, and 13 represents a lipophilic group, for example a saturated or unsaturated linear, branched, or cyclic alkyl group, cholesterol, or a derivative thereof. In another embodiment, W is selected from the group consisting of amide, phosphate, phosphate ester, phosphoramidate, or thiophosphate ester linkage.

[0544] In another embodiment, the invention features a compound having Formula 49:

[chemical structure]

[0545] wherein X comprises a siNA molecule or portion thereof; W comprises a linker molecule or chemical linkage that can be present or absent, Y comprises a linker molecule that can be present or absent; each R₁, R₂, R₃, and R₄ independently comprises O, OH, H, alkyl, alkylhalo, O-alkyl, O-alkylcyano, S, S-alkyl, S-alkylcyano, N or substituted N, and B represents a lipophilic group, for example a saturated or unsaturated linear, branched, or cyclic alkyl group, cholesterol, or a derivative thereof. In another embodiment, W is selected from the group consisting of amide, phosphate, phosphate ester, phosphoramidate, or thiophosphate ester linkage.

[0546] In another embodiment, the invention features a compound having Formula 50:

[chemical structure]

[0547] wherein X comprises a siNA molecule or portion thereof; W comprises a linker molecule or chemical linkage that can be present or absent, Y comprises a linker molecule or chemical linkage that can be present or absent; and each Q independently comprises a hydrophobic group or phospholipid. In another embodiment, W is selected from the group consisting of amide, phosphate, phosphate ester, phosphoramidate, or thiophosphate ester linkage.

[0548] In one embodiment, the invention features a compound having Formula 51:

[chemical structure]

[0549] wherein X comprises a siNA molecule or portion thereof; W comprises a linker molecule or chemical linkage that can be present or absent; Y comprises a linker molecule or amino acid that can be present or absent; Z comprises H, OH, O-alkyl, SH, S-alkyl, alkyl, substituted alkyl, aryl, substituted aryl, amino, substituted amino, nucleotide, nucleoside, nucleic acid, oligonucleotide, amino acid, peptide, protein, lipid, phospholipid, or label; SG comprises a sugar, for example galactose, galactosamine, N-acetyl-galactosamine, glucose, mannose, fructose, or fucose and the respective D or L, alpha or beta isomers, and n is an integer from about 1 to about 20. In another embodiment, W is selected from the group consisting of amide, phosphate, phosphate ester, phosphoramidate, or thiophosphate ester linkage.

[0550] In another embodiment, the invention features a compound having Formula 52:

[chemical structure]

[0551] wherein X comprises a siNA molecule or portion thereof; Y comprises a linker molecule or chemical linkage that can be present or absent; each R₁, R₂, R₃, R₄, and R₅ independently comprises O, OH, H, alkyl, alkylhalo, O-alkyl, O-alkylcyano, S, S-alkyl, S-alkylcyano, N or substituted N; Z comprises H, OH, O-alkyl, SH, S-alkyl, alkyl, substituted alkyl, aryl, substituted aryl, amino, substituted amino, nucleotide, nucleoside, nucleic acid, oligonucleotide, amino acid, peptide, protein, lipid, phospholipid, or label; SG comprises a sugar, for example galactose, galactosamine, N-acetyl-galactosamine, glucose, mannose, fructose, or fucose and the respective D or L, alpha or beta isomers, n is an integer from about 1 to about 20; and N′ is an integer from about 1 to about 20. In another embodiment, X comprises a siNA molecule or a portion thereof. In another embodiment, Y is selected from the group consisting of amide, phosphate, phosphate ester, phosphoramidate, or thiophosphate ester linkage.

[0552] In another embodiment, the invention features a compound having Formula 53:

[chemical structure]

[0553] wherein B comprises H, a nucleoside base, or a non-nucleosidic base with or without protecting groups; each R₁ independently comprises O, N, S, alkyl, or substituted N; each R₂ independently comprises O, OH, H, alkyl, alkylhalo, O-alkyl, O-alkylhalo, S, N, substituted N, or a phosphorus containing group; each R₃ independently comprises N or O—N, each R₄ independently comprises O, CH₂, S, sulfone, or sulfoxy; X comprises H, a removable protecting group, a siNA molecule or a portion thereof; W comprises a linker molecule or chemical linkage that can be present or absent; SG comprises a sugar, for example galactose, galactosamine, N-acetyl-galactosamine, glucose, mannose, fructose, or fucose and the respective D or L, alpha or beta isomers, each n is independently an integer from about 1 to about 50; and N′ is an integer from about 1 to about 10. In another embodiment, W is selected from the group consisting of amide, phosphate, phosphate ester, phosphoramidate, or thiophosphate ester linkage.

[0554] In another embodiment, the invention features a compound having Formula 54:

[chemical structure]

[0555] wherein B comprises H, a nucleoside base, or a non-nucleosidic base with or without protecting groups; each R₁ independently comprises O, OH, H, alkyl, alkylhalo, O-alkyl, O-alkylhalo, S, N, substituted N, or a phosphorus containing group; X comprises H, a removable protecting group, a siNA molecule or a portion thereof; W comprises a linker molecule or chemical linkage that can be present or absent; and SG comprises a sugar, for example galactose, galactosamine, N-acetyl-galactosamine, glucose, mannose, fructose, or fucose and the respective D or L, alpha or beta isomers. In another embodiment, W is selected from the group consisting of amide, phosphate, phosphate ester, phosphoramidate, or thiophosphate ester linkage.

[0556] In one embodiment, the invention features a compound having Formula 55:

[chemical structure]

[0557] wherein each R₁ independently comprises O, N, S, alkyl, or substituted N; each R₂ independently comprises O, OH, H, alkyl, alkylhalo, O-alkyl, O-alkylhalo, S, N, substituted N, or a phosphorus containing group; each R₃ independently comprises H, OH, alkyl, substituted alkyl, or halo; X comprises H, a removable protecting group, a siNA molecule or a portion thereof; W comprises a linker molecule or chemical linkage that can be present or absent; SG comprises a sugar, for example galactose, galactosamine, N-acetyl-galactosamine, glucose, mannose, fructose, or fucose and the respective D or L, alpha or beta isomers, each n is independently an integer from about 1 to about 50; and N′ is an integer from about 1 to about 100. In another embodiment, W is selected from the group consisting of amide, phosphate, phosphate ester, phosphoramidate, or thiophosphate ester linkage.

[0558] In another embodiment, the invention features a compound having Formula 56:

[chemical structure]

[0559] wherein R₁ comprises H, alkyl, alkylhalo, N, substituted N, or a phosphorus containing group; R₂ comprises H, O, OH, alkyl, alkylhalo, halo, S, N, substituted N, or a phosphorus containing group; X comprises H, a removable protecting group, a siNA molecule or a portion thereof; W comprises a linker molecule or chemical linkage that can be present or absent; SG comprises a sugar, for example galactose, galactosamine, N-acetyl-galactosamine, glucose, mannose, fructose, or fucose and the respective D or L, alpha or beta isomers, and each n is independently an integer from about 0 to about 20. In another embodiment, W is selected from the group consisting of amide, phosphate, phosphate ester, phosphoramidate, or thiophosphate ester linkage.

[0560] In another embodiment, the invention features a compound having Formula 57:

[chemical structure]

[0561] wherein R₁ can include the groups:

[chemical structure]

[0562] and wherein R₂ can include the groups:

[chemical structure]

[0563] and wherein Tr is a removable protecting group, for example a trityl, monomethoxytrityl, or dimethoxytrityl; SG comprises a sugar, for example galactose, galactosamine, N-acetyl-galactosamine, glucose, mannose, fructose, or fucose and the respective D or L, alpha or beta isomers, and n is an integer from about 1 to about 20.

[0564] In one embodiment, compounds having Formula 52, 53, 54, 55, 56, and 57 are featured wherein each nitrogen adjacent to a carbonyl can independently be substituted for a carbonyl adjacent to a nitrogen or each carbonyl adjacent to a nitrogen can be substituted for a nitrogen adjacent to a carbonyl.

[0565] In another embodiment, the invention features a compound having Formula 58:

[chemical structure]

[0566] wherein X comprises a siNA molecule or portion thereof; W comprises a linker molecule or chemical linkage that can be present or absent; Y comprises a linker molecule or amino acid that can be present or absent; V comprises a signal protein or peptide, for example Human serum albumin protein, Antennapedia peptide, Kaposi fibroblast growth factor peptide, Caiman crocodylus Ig(5) light chain peptide, HIV envelope glycoprotein gp41 peptide, MV-1 Tat peptide, Influenza hemagglutinin envelope glycoprotein peptide, or transportan A peptide; each n is independently an integer from about 1 to about 50; and N′ is an integer from about 1 to about 100. In another embodiment, W is selected from the group consisting of amide, phosphate, phosphate ester, phosphoramidate, or thiophosphate ester linkage.

[0567] In another embodiment, the invention features a compound having Formula 59:

[chemical structure]

[0568] wherein each R₁ independently comprises O, S, N, substituted N, or a phosphorus containing group; each R₂ independently comprises O, S, or N; X comprises H, amino, substituted amino, nucleotide, nucleoside, nucleic acid, oligonucleotide, or other biologically active molecule; n is an integer from about 1 to about 50, Q comprises H or a removable protecting group which can be optionally absent, each W independently comprises a linker molecule or chemical linkage that can be present or absent, and V comprises a signal protein or peptide, for example Human serum albumin protein, Antennapedia peptide, Kaposi fibroblast growth factor peptide, Caiman crocodylus Ig(5) light chain peptide, HIV envelope glycoprotein gp41 peptide, HIV-1 Tat peptide, Influenza hemagglutinin envelope glycoprotein peptide, or transportan A peptide, or a compound having Formula 45

[chemical structure]

[0569] wherein Z comprises H, OH, O-alkyl, SH, S-alkyl, alkyl, substituted alkyl, aryl, substituted aryl, amino, substituted amino, a removable protecting group, a siNA molecule or a portion thereof; and n is an integer from about 1 to about 100. In another embodiment, W is selected from the group consisting of amide, phosphate, phosphate ester, phosphoramidate, or thiophosphate ester linkage.

[0570] In another embodiment, the invention features a compound having Formula 60:

[chemical structure]

wherein R₁ can include the groups:

[chemical structure]

and wherein R₂ can include the groups:

[chemical structure]

[0571] and wherein Tr is a removable protecting group, for example a trityl, monomethoxytrityl, or dimethoxytrityl; n is an integer from about 1 to about 50; and R₈ is a nitrogen protecting group, for example a phthaloyl, trifluoroacetyl, FMOC, or monomethoxytrityl group.

[0572] In another embodiment, the invention features a compound having Formula 61:

[chemical structure]

[0573] wherein X comprises a siNA molecule or portion thereof; each W independently comprises a linker molecule or chemical linkage that can be the same or different and can be present or absent, Y comprises a linker molecule that can be present or absent; each 5 independently comprises a signal protein or peptide, for example Human serum albumin protein, Antennapedia peptide, Kaposi fibroblast growth factor peptide, Caiman crocodylus Ig(5) light chain peptide, HIV envelope glycoprotein gp41 peptide, HIV-1 Tat peptide, Influenza hemagglutinin envelope glycoprotein peptide, or transportan A peptide;; each R₁, R₂, R₃, and R₄ independently comprises O, OH, H, alkyl, alkylhalo, O-alkyl, O-alkylcyano, S, S-alkyl, S-alkylcyano, N or substituted N, and n is an integer from about 1 to about 10. In another embodiment, W is selected from the group consisting of amide, phosphate, phosphate ester; phosphoramidate, or thiophosphate ester linkage.

[0574] In another embodiment, the invention features a compound having Formula 62:

[chemical structure]

[0575] wherein X comprises a siNA molecule or portion thereof; each 5 independently comprises a signal protein or peptide, for example Human serum albumin protein, Antennapedia peptide, Kaposi fibroblast growth factor peptide, Caiman crocodylus Ig(5) light chain peptide, HIV envelope glycoprotein gp41 peptide, HIV-1 Tat peptide, Influenza hemagglutinin envelope glycoprotein peptide, or transportan A peptide; W comprises a linker molecule or chemical linkage that can be present or absent; each R₁, R₂, and R₃ independently comprises O, OH, H, alkyl, alkylhalo, O-alkyl, O-alkylcyano, S, S-alkyl, S-alkylcyano, N or substituted N, and each n is independently an integer from about 1 to about 10. In another embodiment, W is selected from the group consisting of amide, phosphate, phosphate ester, phosphoramidate, or thiophosphate ester linkage.

[0576] In another embodiment, the invention features a compound having Formula 63:

[chemical structure]

[0577] wherein X comprises a siNA molecule or portion thereof; V comprises a signal protein or peptide, for example Human serum albumin protein, Antennapedia peptide,

[0578] Kaposi fibroblast growth factor peptide, Caiman crocodylus Ig(5) light chain peptide, HIV envelope glycoprotein gp41 peptide, HIV-1 Tat peptide, Influenza hemagglutinin envelope glycoprotein peptide, or transportan A peptide; W comprises a linker molecule or chemical linkage that can be present or absent; each R₁, R₂, R₃ independently comprises O, OH, H, alkyl, alkylhalo, O-alkyl, O-alkylcyano, S, S-alkyl, S-alkylcyano, N or substituted N, R₄ represents an ester, amide, or protecting group, and each n is independently an integer from about 1 to about 10. In another embodiment, W is selected from the group consisting of amide, phosphate, phosphate ester, phosphoramidate, or thiophosphate ester linkage.

[0579] In another embodiment, the invention features a compound having Formula 64:

[chemical structure]

[0580] wherein X comprises a siNA molecule or portion thereof; each W independently comprises a linker molecule or chemical linkage that can be present or absent, Y comprises a linker molecule that can be present or absent; each R₁, R₂, R₃, and R₄ independently comprises O, OH, H, alkyl, alkylhalo, O-alkyl, O-alkylcyano, S, S-alkyl, S-alkylcyano, N or substituted N, A comprises a nitrogen containing group, and B comprises a lipophilic group. In another embodiment, W is selected from the group consisting of amide, phosphate, phosphate ester, phosphoramidate, or thiophosphate ester linkage.

[0581] In another embodiment, the invention features a compound having Formula 65:

[chemical structure]

[0582] wherein X comprises a siNA molecule or portion thereof; each W independently comprises a linker molecule or chemical linkage that can be present or absent, Y comprises a linker molecule that can be present or absent; each R₁, R₂, R₃, and R₄ independently comprises O, OH, H, alkyl, alkylhalo, O-alkyl, O-alkylcyano, S, S-alkyl, S-alkylcyano, or substituted N, RV comprises the lipid or phospholipid component of any of Formulae 47-50, and R₆ comprises a nitrogen containing group. In another embodiment, W is selected from the group consisting of amide, phosphate, phosphate ester, phosphoramidate, or thiophosphate ester linkage.

[0583] In another embodiment, the invention features a compound having Formula 92:

[chemical structure]

[0584] wherein B comprises H, a nucleoside base, or a non-nucleosidic base with or without protecting groups; each R₁ independently comprises O, OH, H, alkyl, alkylhalo, O-alkyl, O-alkylhalo, S, N, substituted N, or a phosphorus containing group; X comprises

[0585] H, a removable protecting group, amino, substituted amino, nucleotide, nucleoside, nucleic acid, oligonucleotide, enzymatic nucleic acid, amino acid, peptide, protein, lipid, phospholipid, biologically active molecule or label; W comprises a linker molecule or chemical linkage that can be present or absent; R₂ comprises O, NH, S, CO, COO, ON═C, or alkyl; R₃ comprises alkyl, alkoxy, or an aminoacyl side chain; and SG comprises a sugar, for example galactose, galactosamine, N-acetyl-galactosamine, glucose, mannose, fructose, or fucose and the respective D or L, alpha or beta isomers. In another embodiment, W is selected from the group consisting of amide, phosphate, phosphate ester, phosphoramidate, or thiophosphate ester linkage.

[0586] In another embodiment, the invention features a compound having Formula 86:

[chemical structure]

[0587] wherein R₁ comprises H, alkyl, alkylhalo, N, substituted N, or a phosphorus containing group; R₂ comprises H, O, OH, alkyl, alkylhalo, halo, S, N, substituted N, or a phosphorus containing group; X comprises H, a removable protecting group, a siNA molecule or a portion thereof; W comprises a linker molecule or chemical linkage that can be present or absent; R₃ comprises O, NH, S, CO, COO, ON═C, or alkyl; R₄ comprises alkyl, akloxy, or an aminoacyl side chain; and SG comprises a sugar, for example galactose, galactosamine, N-acetyl-galactosamine, glucose, mannose, fructose, or fucose and the respective D or L, alpha or beta isomers, and each n is independently an integer from about 0 to about 20. In another embodiment, W is selected from the group consisting of amide, phosphate, phosphate ester, phosphoramidate, or thiophosphate ester linkage.

[0588] In another embodiment, the invention features a compound having Formula 87:

[chemical structure]

[0589] wherein X comprises a protein, peptide, antibody, lipid, phospholipid, oligosaccharide, label, biologically active molecule, for example a vitamin such as folate, vitamin A, E, B6, B12, coenzyme, antibiotic, antiviral, nucleic acid, nucleotide, nucleoside, or oligonucleotide such as an enzymatic nucleic acid, allozyme, antisense nucleic acid, siNA, 2,5-A chimera, decoy, aptamer or triplex forming oligonucleotide, or polymers such as polyethylene glycol; W comprises a linker molecule or chemical linkage that can be present or absent; and Y comprises siNA or a portion thereof; R₁ comprises H, alkyl, or substituted alkyl. In another embodiment, W is selected from the group consisting of amide, phosphate, phosphate ester, phosphoramidate, or thiophosphate ester linkage.

[0590] In another embodiment, the invention features a compound having Formula 88:

[chemical structure]

[0591] wherein X comprises a protein, peptide, antibody, lipid, phospholipid, oligosaccharide, label, biologically active molecule, for example a vitamin such as folate, vitamin A, E, B6, B12, coenzyme, antibiotic, antiviral, nucleic acid, nucleotide, nucleoside, or oligonucleotide such as an enzymatic nucleic acid, allozyme, antisense nucleic acid, siNA, 2,5-A chimera, decoy, aptamer or triplex forming oligonucleotide, or polymers such as polyethylene glycol; W comprises a linker molecule or chemical linkage that can be present or absent, and Y comprises a siNA or a portion thereof. In another embodiment, W is selected from the group consisting of amide, phosphate, phosphate ester, phosphoramidate, or thiophosphate ester linkage.

[0592] In another embodiment, the invention features a compound having Formula 99:

[chemical structure]

[0593] wherein X comprises a siNA molecule or portion thereof; each W independently comprises a linker molecule or chemical linkage that can be present or absent, Y comprises a linker molecule that can be present or absent; each R₁, R₂, R₃, and R₄ independently comprises O, OH, H, alkyl, alkylhalo, O-alkyl, O-alkylcyano, S, S-alkyl, S-alkylcyano, N or substituted N, and SG comprises a sugar, for example galactose, galactosamine, N-acetyl-galactosamine or branched derivative thereof, glucose, mannose, fructose, or fucose and the respective D or L, alpha or beta isomers: In another embodiment, W is selected from the group consisting of amide, phosphate, phosphate ester, phosphoramidate, or thiophosphate ester linkage.

[0594] In another embodiment, the invention features a compound having Formula 100:

[chemical structure]

[0595] wherein X comprises a siNA molecule or portion thereof; W comprises a linker molecule or chemical linkage that can be present or absent, Y comprises a linker molecule that can be present or absent; each R₁, R₂, R₃, and R₄ independently comprises O, OH, H, alkyl, alkylhalo, O-alkyl, O-alkylcyano, S, S-alkyl, S-alkylcyano, N or substituted N, and SG comprises a sugar, for example galactose, galactosamine, N-acetyl-galactosamine or branched derivative thereof, glucose, mannose, fructose, or fucose and the respective D or L, alpha or beta isomers. In another embodiment, W is selected from the group consisting of amide, phosphate, phosphate ester, phosphoramidate, or thiophosphate ester linkage.

[0596] In one embodiment, the SG component of any compound having Formulae 99 or 100 comprises a compound having Formula 101:

[chemical structure]

[0597] wherein Y comprises a linker molecule or chemical linkage that can be present or absent and each R₇ independently comprises an acyl group that can be present or absent, for example a acetyl group.

[0598] In one embodiment, the W—SG component of a compound having Formulae 99 comprises a compound having Formula 102:

[chemical structure]

[0599] wherein R₂ comprises O, OH, H, alkyl, alkylhalo, O-alkyl, O-alkylhalo, S, N, substituted N, a protecting group, or another compound having Formula 102; R₁ independently H, OH, alkyl, substituted alkyl, or halo and each R₇ independently comprises an acyl group that can be present or absent, for example a acetyl group, and R₃ comprises O or R₃ in Formula 99, and n is an integer from about 1 to about 20.

[0600] In one embodiment, the W-SG component of a compound having Formulae 99 comprises a compound having Formula 103:

[chemical structure]

[0601] wherein R₁ comprises H, alkyl, alkylhalo, O-alkyl, O-alkylhalo, S, N, substituted N, a protecting group, or another compound having Formula 103; each R₇ independently comprises an acyl group that can be present or absent, for example a acetyl group, and R₃ comprises H or R₃ in Formula 99, and each n is independently an integer from about 1 to about 20.

[0602] In one embodiment, the invention features a compound having Formula 104:

[chemical structure]

[0603] wherein R₃ comprises H, OH, amino, substituted amino, nucleotide, nucleoside, nucleic acid, oligonucleotide, amino acid, peptide, protein, lipid, phospholipid, label, or a portion thereof, or OR₅ where R₅ a removable protecting group, R₄ comprises O, alkyl, alkylhalo, O-alkyl, O-alkylcyano, S, S-alkyl, S-alkylcyano, N or substituted N, each R₇ independently comprises an acyl group that can be present or absent, for example a acetyl group, and each n is independently an integer from about 1 to about 20, and wherein R₁ can include the groups:

[chemical structure]

[0604] and wherein R₂ can include the groups:

[chemical structure]

[0605] In one embodiment, the invention features a compound having Formula 105:

[chemical structure]

[0606] wherein X comprises a siNA molecule or a portion thereof, R₂ comprises O, OH, H, alkyl, alkylhalo, O-alkyl, O-alkylhalo, S, N, substituted N, a protecting group, or a nucleotide, polynucleotide, or oligonucleotide or a portion thereof; R₁ independently H, OH, alkyl, substituted alkyl, or halo and each R₇ independently comprises an acyl group that can be present or absent, for example a acetyl group, and n is an integer from about 1 to about 20.

[0607] In one embodiment, the invention features a compound having Formula 106:

[chemical structure]

[0608] wherein X comprises a siNA molecule or a portion thereof, R₁ comprises H, OH, amino, substituted amino, nucleotide, nucleoside, nucleic acid, oligonucleotide, amino acid, peptide, protein, lipid, phospholipid, label, or a portion thereof, or OR_{S} where R₅ a removable protecting group, each R₇ independently comprises an acyl group that can be present or absent, for example a acetyl group, and each n is independently an integer from about 1 to about 20

[0609] In another embodiment, the invention features a compound having Formula 107:

[chemical structure]

[0610] wherein X comprises a siNA molecule or portion thereof; each W independently comprises a linker molecule or chemical linkage that can be present or absent, Y comprises a linker molecule that can be present or absent; each R₁, R₂, R₃, and R₄ independently comprises O, OH, H, alkyl, alkylhalo, O-alkyl, O-alkylcyano, S, S-alkyl, S-alkylcyano, N or substituted N, and Cholesterol comprises cholesterol or an analog, derivative, or metabolite thereof. In another embodiment, W is selected from the group consisting of amide, phosphate, phosphate ester, phosphoramidate, or thiophosphate ester linkage.

[0611] In another embodiment, the invention features a compound having Formula 108:

[chemical structure]

[0612] wherein X′ comprises a siNA molecule or portion thereof; W comprises a linker molecule or chemical linkage that can be present or absent, Y comprises a linker molecule that can be present or absent; each R₁, R₂, R₃, and R₄ independently comprises O, OH, H, alkyl, alkylhalo, O-alkyl, O-alkylcyano, S, S-alkyl, S-alkylcyano, N or substituted N, and Cholesterol comprises cholesterol or an analog, derivative, or metabolite thereof. In another embodiment, W is selected from the group consisting of amide, phosphate, phosphate ester, phosphoramidate, or thiophosphate ester linkage.

[0613] In one embodiment, the W-Cholesterol component of a compound having Formula 107 comprises a compound having Formula 109:

[chemical structure]

[0614] wherein R₃ comprises R₃ as described in Formula 107, and n is independently an integer from about 1 to about 20.

[0615] In one embodiment, the invention features a compound having Formula 110:

[chemical structure]

[0616] wherein R₄ comprises O, alkyl, alkylhalo, O-alkyl, O-alkylcyano, S, S-alkyl, S-alkylcyano, N or substituted N, each n is independently an integer from about 1 to about 20, and

[0617] wherein R₁ can include the groups:

[chemical structure]

[0618] and wherein R₂ can include the groups:

[chemical structure]

[0619] In one embodiment, the invention features a compound having Formula 111:

[chemical structure]

[0620] wherein X comprises a siNA molecule or portion thereof; W comprises a linker molecule or chemical linkage that can be present or absent, and n is an integer from about 1 to about 20. In another embodiment, W is selected from the group consisting of amide, phosphate, phosphate ester, phosphoramidate, or thiophosphate ester linkage.

[0621] In one embodiment, the invention features a compound having Formula 112:

[chemical structure]

[0622] wherein n is an integer from about 1 to about 20. In another embodiment, a compound having Formula 112 is used to generate a compound having Formula 111 via NHS ester mediated coupling with a biologically active molecule, such as a siNA molecule or a portion thereof. In a non-limiting example, the NHS ester coupling can be effectuated via attachment to a free amine present in the siNA molecule, such as an amino linker molecule present on a nucleic acid sugar (e.g., 2′-amino linker) or base (e.g., C5 alkyl amine linker) component of the siNA molecule.

[0623] In one embodiment, the invention features a compound having Formula 113:

[chemical structure]

[0624] wherein R₃ comprises H, OH, amino, substituted amino, nucleotide, nucleoside, nucleic acid, oligonucleotide, amino acid, peptide, protein, lipid, phospholipid, label, or a portion thereof, or OR₅ where R₅ a removable protecting group, R₄ comprises O, alkyl, alkylhalo, O-alkyl, O-alkylcyano, S, S-alkyl, S-alkylcyano, N or substituted N, each n is independently an integer from about 1 to about 20, and

[0625] wherein R₁ can include the groups:

[chemical structure]

[0626] and wherein R₂ can include the groups:

[chemical structure]

[0627] In another embodiment, a compound having Formula 113 is used to generate a compound having Formula 111 via phosphoramidite mediated coupling with a biologically active molecule, such as a siNA molecule or a portion thereof.

[0628] In one embodiment, the invention features a compound having Formula 114:

[chemical structure]

[0629] wherein X comprises a siNA molecule or portion thereof; W comprises a linker molecule or chemical linkage that can be present or absent, and n is an integer from about 1 to about 20. In another embodiment, W is selected from the group consisting of amid; phosphate, phosphate ester, phosphoramidate, or thiophosphate ester linkage.

[0630] In one embodiment, the invention features a compound having Formula 115:

[chemical structure]

[0631] wherein X comprises a siNA molecule or portion thereof; W comprises a linker molecule or chemical linkage that can be present or absent, R₃ comprises H, OH, amino, substituted amino, nucleotide, nucleoside, nucleic acid, oligonucleotide, amino acid, peptide, protein, lipid, phospholipid, label, or a portion thereof, or OR₅ where R₅ a removable protecting group, and each n is independently an integer from about 1 to about 20. In another embodiment, W is selected from the group consisting of amide, phosphate, phosphate ester, phosphoramidate, or thiophosphate ester linkage.

[0632] In one embodiment, the invention features a compound having Formula 116:

[chemical structure]

[0633] wherein R₃ comprises H, OH, amino, substituted amino, nucleotide, nucleoside, nucleic acid, oligonucleotide, amino acid, peptide, protein, lipid, phospholipid, label, or a portion thereof, or OR₅ where R₅ a removable protecting group, R₄ comprises O, alkyl, alkylhalo, O-alkyl, O-alkylcyano, S, S-alkyl, S-alkylcyano, N or substituted N, each n is independently an integer from about 1 to about 20, and

[0634] wherein R₁ can include the groups:

[chemical structure]

[0635] and wherein R₂ can include the groups:

[chemical structure]

[0636] In another embodiment, a compound having Formula 116 is used to generate a compound having Formula 114 or 115 via phosphoramidite mediated coupling with a biologically active molecule, such as a siNA molecule or a portion thereof.

[0637] In one embodiment, the invention features a compound having Formula 117:

[chemical structure]

[0638] wherein R₃ comprises H, OH, amino, substituted amino, nucleotide, nucleoside, nucleic acid, oligonucleotide, amino acid, peptide, protein, lipid, phospholipid, label, or a portion thereof, or OR₅ where R₅ a removable protecting group, R₄ comprises O, alkyl, alkylhalo, O-alkyl, O-alkylcyano, S, S-alkyl, S-alkylcyano, N or substituted N, each R₇ independently comprises an acyl group that can be present or absent, for example a acetyl group, each n is independently an integer from about 1 to about 20, and

[0639] wherein R₁ can include the groups:

[chemical structure]

[0640] and wherein R₂ can include the groups:

[chemical structure]

[0641] In another embodiment, a compound having Formula 117 is used to generate a compound having Formula 105 via phosphoramidite mediated coupling with a biologically active molecule, such as a siNA molecule or a portion thereof.

[0642] In one embodiment, the invention features a compound having Formula 118:

[chemical structure]

[0643] wherein X comprises a siNA molecule or portion thereof; W comprises a linker molecule or chemical linkage that can be present or absent, R₃ comprises H, OH, amino, substituted amino, nucleotide, nucleoside, nucleic acid, oligonucleotide, amino acid, peptide, protein, lipid, phospholipid, label, or a portion thereof, or OR₅ where R₅ a removable protecting group, each R₇ independently comprises an acyl group that can be present or absent, for example a acetyl group, and each n is independently an integer from about 1 to about 20. In another embodiment, W is selected from the group consisting of amide, phosphate, phosphate ester, phosphoramidate, or thiophosphate ester linkage.

[0644] In one embodiment, the invention features a compound having Formula 119:

[chemical structure]

[0645] wherein X comprises a siNA molecule or portion thereof; W comprises a linker molecule or chemical linkage that can be present or absent, each R₇ independently comprises an acyl group that can be present or absent, for example a acetyl group, and each n is independently an integer from about 1 to about 20. In another embodiment, W is selected from the group consisting of amide, phosphate, phosphate ester, phosphoramidate, or thiophosphate ester linkage.

[0646] In one embodiment, the invention features a compound having Formula 120:

[chemical structure]

[0647] wherein R₃ comprises H, OH, amino, substituted amino, nucleotide, nucleoside, nucleic acid, oligonucleotide, amino acid, peptide, protein, lipid, phospholipid, label, or a portion thereof, or OR₅ where R₅ a removable protecting group, R₄ comprises O, alkyl, alkylhalo, O-alkyl, O-alkylcyano, S, S-alkyl, S-alkylcyano, N or substituted N, each R₇ independently comprises an acyl group that can be present or absent, for example a acetyl group, each n is independently an integer from about 1 to about 20, and wherein R₁ can include the groups:

[chemical structure]

[0648] and wherein R₂ can include the groups:

[chemical structure]

[0649] In another embodiment, a compound having Formula 120 is used to generate a compound having Formula 118 or 119 via phosphoramidite mediated coupling with a biologically active molecule, such as a siNA molecule or a portion thereof.

[0650] In one embodiment, the invention features a compound having Formula 121:

[chemical structure]

[0651] wherein X comprises a siNA molecule or portion thereof; W comprises a linker molecule or chemical linkage that can be present or absent, each R₇ independently comprises an acyl group that can be present or absent, for example a acetyl group, and each n is independently an integer from about 1 to about 20. In another embodiment, W is selected from the group consisting of amide, phosphate, phosphate ester, phosphoramidate, or thiophosphate ester linkage.

[0652] In one embodiment, the invention features a compound having Formula 122:

[chemical structure]

[0653] wherein R₃ comprises H, OH, amino, substituted amino, nucleotide, nucleoside, nucleic acid, oligonucleotide, amino acid, peptide, protein, lipid, phospholipid, label, or a portion thereof, or OR_{S} where R₅ a removable protecting group, R₄ comprises O, alkyl, alkylhalo, O-alkyl, O-alkylcyano, S, S-alkyl, S-alkylcyano, N or substituted N, each R₇ independently comprises an acyl group that can be present or absent, for example a acetyl group, each n is independently an integer from about 1 to about 20, and

[0654] wherein R₁ can include the groups:

[chemical structure]

[0655] and wherein R₂ can include the groups:

[chemical structure]

[0656] In another embodiment, a compound having Formula 122 is used to generate a compound having Formula 121 via phosphoramidite mediated coupling with a biologically active molecule, such as a siNA molecule or a portion thereof.

[0657] In one embodiment, the invention features a compound having Formula 94,

X—Y—W—Y—Z 94

[0658] wherein X comprises a siNA molecule or a portion thereof; each Y independently comprises a linker or chemical linkage that can be present or absent, W comprises a biodegradable nucleic acid linker molecule, and Z comprises a biologically active molecule, for example an enzymatic nucleic acid, allozyme, antisense nucleic acid, siNA, 2,5-A chimera, decoy, aptamer or triplex forming oligonucleotide, peptide, protein, or antibody.

[0659] In another embodiment, W of a compound having Formula 94 of the invention comprises 5′-cytidine-deoxythymidine-3′, 5′-deoxythymidine-cytidine-3′, 5′-cytidine-deoxyuridine-3′, 5′-deoxyuridine-cytidine-3′, 5′-uridine-deoxythymidine-3′, or 5′-deoxythymidine-uridine-3′.

[0660] In yet another embodiment, W of a compound having Formula 94 of the invention comprises 5′-adenosine-deoxythymidine-3′, 5′ -deoxythymidine-adenosine-3′, 5′-adenosine-deoxyuridine-3′, or 5′-deoxyuridine-adenosine-3′.

[0661] In another embodiment, Y of a compound having Formula 94 of the invention comprises a phosphorus containing linkage, phoshoramidate linkage, phosphodiester linkage, phosphorothioate linkage, amide linkage, ester linkage, carbamate linkage, disulfide linkage, oxime linkage, or morpholino linkage.

[0662] In another embodiment, compounds having Formula 89 and 91 of the invention are synthesized by periodate oxidation of an N-terminal Serine or Threonine residue of a peptide or protein.

[0663] In one embodiment, X of compounds having Formulae 43, 44, 46-52, 58, 61-65, 85-88, 92, 94, 95, 99, 100, 105-108, 111, 114, 115, 118, 119, or 121 of the invention comprises a siNA molecule or a portion thereof. In one embodiment, the siNA molecule can be conjugated at the 5′ end, 3′-end, or both 5′ and 3′ ends of the sense strand or region of the siNA. In one embodiment, the siNA molecule can be conjugated at the 3′-end of the antisense strand or region of the siNA with a compound of the invention. In one embodiment, both the sense strand and antisense strands or regions of the siNA molecule are conjugated with a compound of the invention. In one embodiment, only the sense strand or region of the siNA is conjugated with a compound of the invention. In one embodiment, only the antisense strand or region of the siNA is conjugated with a compound of the invention.

[0664] In one embodiment, W and/or Y of compounds having Formulae 43, 44, 46-52, 58, 61-65, 85-88, 92, 94, 95, 99, 100, 101, 107, 108, 111, 114, 115, 118, 119, or 121 of the invention comprises a degradable or cleavable linker, for example a nucleic acid sequence comprising ribonucleotides and/or deoxynucleotides, such as a dimer, trimer, or tetramer. A non limiting example of a nucleic acid cleavable linker is an adenosine-deoxythymidine (A-dT) dimer or a cytidine-deoxythymidine (C-dT) dimer. In yet another embodiment, W and/or V of compounds having Formulae 43, 44, 48-51, 58, 63-65, 96, 99, 100, 107, 108, 111, 114, 115, 118, 119, or 121 of the invention comprises a N-hydroxy succinimide (NHS) ester linkage, oxime linkage, disulfide linkage, phosphoramidate, phosphorothioate, phosphorodithioate, phosphodiester linkage, or NHC(O), CH₃NC(O), CONH, C(O)NCH₃, S, SO, SO₂, O, NH, NCH₃ group. In another embodiment, the degradable linker, W and/or Y, of compounds having Formulae Formulae 43, 44, 46-52, 58, 61-65, 85-88, 92, 94, 95, 99, 100, 101, 107, 108, 111, 114, 115, 118, 119, or 121 of the invention comprises a linker that is susceptible to cleavage by carboxypeptidase activity.

[0665] In another embodiment, W and/or Y of Formulae Formulae 43, 44, 46-52, 58, 61-65, 85-88, 92, 94, 95, 99, 100, 101, 107, 108, 111, 114, 115, 118, 119, or 121 comprises a polyethylene glycol linker having Formula 45:

[chemical structure]

[0666] wherein Z comprises H, OH, O-alkyl, SH, S-alkyl, alkyl, substituted alkyl, aryl, substituted aryl, amino, substituted amino, nucleotide, nucleoside, nucleic acid, oligonucleotide, amino acid, peptide, protein, lipid, phospholipid, or label; and n is an integer from about 1 to about 100.

[0667] In one embodiment, the nucleic acid conjugates of the instant invention are assembled by solid phase synthesis, for example on an automated peptide synthesizer, for example a Miligen 9050 synthesizer and/or an automated oligonucleotide synthesizer such as an ABI 394, 390Z, or Pharmacia OligoProcess, OligoPilot, OligoMax, or AKTA synthesizer. In another embodiment, the nucleic acid conjugates of the invention are assembled post synthetically, for example, following solid phase oligonucleotide synthesis (see for example FIGS. 45, 50, 53, and 73).

[0668] In another embodiment, V of compounds having Formula 58-63 and 96 comprise peptides having SEQ ID NOS: 1114-1123 (Table V).

[0669] In one embodiment, the nucleic acid conjugates of the instant invention are assembled post synthetically, for example, following solid phase oligonucleotide synthesis.

[0670] The present invention provides compositions and conjugates comprising nucleosidic and non-nucleosidic derivatives. The present invention also provides nucleic acid, polynucleotide and oligonucleotide derivatives including RNA, DNA, and PNA based conjugates. The attachment of compounds of the invention to nucleosides, nucleotides, non-nucleosides, and nucleic acid molecules is provided at any position within the molecule, for example, at internucleotide linkages, nucleosidic sugar hydroxyl groups such as 5′, 3′, and 2′-hydroxyls, and/or at nucleobase positions such as amino and carbonyl groups.

[0671] The exemplary conjugates of the invention are described as compounds of the formulae herein, however, other peptide, protein, phospholipid, and poly-alkyl glycol derivatives are provided by the invention, including various analogs of the compounds of formulae 1-122, including but not limited to different isomers of the compounds described herein.

[0672] The exemplary folate conjugates of the invention are described as compounds shown by formulae herein, however, other folate and antifolate derivatives are provided by the invention, including various folate analogs of the formulae of the invention, including dihydrofloates, tetrahydrofolates, tetrahydorpterins, folinic acid, pteropolyglutamic acid, 1-deza, 3-deaza, 5-deaza, 8-deaza, 10-deaza, 1,5-deaza, 5,10 dideaza, 8,10-dideaza, and 5,8-dideaza folates, antifolates, and pteroic acids. As used herein, the term “folate” is meant to refer to folate and folate derivatives, including pteroic acid derivatives and analogs.

[0673] The present invention features compositions and conjugates to facilitate delivery of molecules into a biological system such as cells. The conjugates provided by the instant invention can impart therapeutic activity by transferring therapeutic compounds across cellular membranes. The present invention encompasses the design and synthesis of novel agents for the delivery of molecules, including but not limited to siNA molecules. In general, the transporters described are designed to be used either individually or as part of a multi-component system. The compounds of the invention generally shown in Formulae herein are expected to improve delivery of molecules into a number of cell types originating from different tissues, in the presence or absence of serum.

[0674] In another embodiment, the compounds of the invention are provided as a surface component of a lipid aggregate, such as a liposome encapsulated with the predetermined molecule to be delivered. Liposomes, which can be unilamellar or multilamellar, can introduce encapsulated material into a cell by different mechanisms. For example, the liposome can directly introduce its encapsulated material into the cell cytoplasm by fusing with the cell membrane. Alternatively, the liposome can be compartmentalized into an acidic vacuole (i.e., an endosome) and its contents released from the liposome and out of the acidic vacuole into the cellular cytoplasm.

[0675] In one embodiment the invention features a lipid aggregate formulation of the compounds described herein, including phosphatidylcholine (of varying chain length; e.g., egg yolk phosphatidylcholine), cholesterol, a cationic lipid, and 1,2-distearoyl-sn-glycero-3 -phosphoethanolamine-polythyleneglycol-2000 (DSPE-PEG2000). The cationic lipid component of this lipid aggregate can be any cationic lipid known in the art such as dioleoyl 1,2,-diacyl-3-trimethylammonium-propane (DOTAP). In another embodiment this cationic lipid aggregate comprises a covalently bound compound described in any of the Formulae herein.

[0676] In another embodiment, polyethylene glycol (PEG) is covalently attached to the compounds of the present invention. The attached PEG can be any molecular weight but is preferably between 2000-50,000 daltons.

[0677] The compounds and methods of the present invention are useful for introducing nucleotides, nucleosides, nucleic acid molecules, lipids, peptides, proteins, and/or non-nucleosidic small molecules into a cell. For example, the invention can be used for nucleotide, nucleoside, nucleic acid, lipids, peptides, proteins, and/or non-nucleosidic small molecule delivery where the corresponding target site of action exists intracellularly.

[0678] In one embodiment, the compounds of the instant invention provide conjugates of molecules that can interact with cellular receptors, such as high affinity folate receptors and ASGPr receptors, and provide a number of features that allow the efficient delivery and subsequent release of conjugated compounds across biological membranes. The compounds utilize chemical linkages between the receptor ligand and the compound to be delivered of length that can interact preferentially with cellular receptors. Furthermore, the chemical linkages between the ligand and the compound to be delivered can be designed as degradable linkages, for example by utilizing a phosphate linkage that is proximal to a nucleophile, such as a hydroxyl group. Deprotonation of the hydroxyl group or an equivalent group, as a result of pH or interaction with a nuclease, can result in nucleophilic attack of the phosphate resulting in a cyclic phosphate intermediate that can be hydrolyzed. This cleavage mechanism is analogous RNA cleavage in the presence of a base or RNA nuclease. Alternately, other degradable linkages can be selected that respond to various factors such as UV irradiation, cellular nucleases, pH, temperature etc. The use of degradable linkages allows the delivered compound to be released in a predetermined system, for example in the cytoplasm of a cell, or in a particular cellular organelle.

[0679] The present invention also provides ligand derived phosphoramidites that are readily conjugated to compounds and molecules of interest. Phosphoramidite compounds of the invention permit the direct attachment of conjugates to molecules of interest without the need for using nucleic acid phosphoramidite species as scaffolds. As such, the used of phosphoramidite chemistry can be used directly in coupling the compounds of the invention to a compound of interest, without the need for other condensation reactions, such as condensation of the ligand to an amino group on the nucleic acid, for example at the N6 position of adenosine or a 2′-deoxy-2′-amino function. Additionally, compounds of the invention can be used to introduce non-nucleic acid based conjugated linkages into oligonucleotides that can provide more efficient coupling during oligonucleotide synthesis than the use of nucleic acid-based phosphoramidites. This improved coupling can take into account improved steric considerations of abasic or non-nucleosidic scaffolds bearing pendant alkyl linkages.

[0680] Compounds of the invention utilizing triphosphate groups can be utilized in the enzymatic incorporation of conjugate molecules into oligonucleotides. Such enzymatic incorporation is useful when conjugates are used in post-synthetic enzymatic conjugation or selection reactions, (see for example Matulic-Adamic et al., 2000, Bioorg. Med. Chem. Lett., 10, 1299-1302; Lee et al., 2001, NAR., 29, 1565-1573; Joyce, 1989, Gene, 82, 83-87; Beaudry et al., 1992, Science 257, 635-641; Joyce, 1992, Scientific American 267, 90-97; Breaker et al., 1994, TIBTECH 12, 268; Bartel et al., 1993, Science 261:1411-1418; Szostak, 1993, TIBS 17, 89-93; Kumar et al., 1995, FASEB J., 9, 1183; Breaker, 1996, Curr. Op. Biotech., 7, 442; Santoro et al., 1997, Proc. Natl. Acad. Sci., 94, 4262; Tang et al., 1997, RNA 3, 914; Nakamaye & Eckstein, 1994, supra; Long & Uhlenbeck, 1994, supra; Ishizaka et al., 1995, supra; Vaish et al., 1997, Biochemistry 36, 6495; Kuwabara et al., 2000, Curr. Opin. Chem. Biol., 4, 669).

[0681] The term “biodegradable linker” as used herein, refers to a nucleic acid or non-nucleic acid linker molecule that is designed as a biodegradable linker to connect one molecule to another molecule, for example, a biologically active molecule to a siNA molecule of the invention or the sense and antisense strands of a siNA molecule of the invention. The biodegradable linker is designed such that its stability can be modulated for a particular purpose, such as delivery to a particular tissue or cell type. The stability of a nucleic acid-based biodegradable linker molecule can be modulated by using various chemistries, for example combinations of ribonucleotides, deoxyribonucleotides, and chemically-modified nucleotides, such as 2′-O-methyl, 2′-fluoro, 2′-amino, 2′-O-amino, 2′-C-allyl, 2′-O-allyl, and other 2′-modified or base modified nucleotides. The biodegradable nucleic acid linker molecule can be a dimer, trimer, tetramer or longer nucleic acid molecule, for example, an oligonucleotide of about 2, 3, 4, 5, 6, 7, 8, 9, 10, 11, 12, 13, 14, 15, 16, 17, 18, 19, or 20 nucleotides in length, or can comprise a single nucleotide with a phosphorus-based linkage, for example, a phosphoramidate or phosphodiester linkage. The biodegradable nucleic acid linker molecule can also comprise nucleic acid backbone, nucleic acid sugar, or nucleic acid base modifications.

[0682] The term “biodegradable” as used herein, refers to degradation in a biological system, for example enzymatic degradation or chemical degradation.

[0683] The term “biologically active molecule” as used herein, refers to compounds or molecules that are capable of eliciting or modifying a biological response in a system.

[0684] Non-limiting examples of biologically active siNA molecules either alone or in combination with other molecules contemplated by the instant invention include therapeutically active molecules such as antibodies, cholesterol, hormones, antivirals, peptides, proteins, chemotherapeutics, small molecules, vitamins, co-factors, nucleosides, nucleotides, oligonucleotides, enzymatic nucleic acids, antisense nucleic acids, triplex forming oligonucleotides, 2,5-A chimeras, siNA, dsRNA, allozymes, aptamers, decoys and analogs thereof. Biologically active molecules of the invention also include molecules capable of modulating the pharmacokinetics and/or pharmacodynamics of other biologically active molecules, for example, lipids and polymers such as polyamines, polyamides, polyethylene glycol and other polyethers.

[0685] The term “phospholipid” as used herein, refers to a hydrophobic molecule comprising at least one phosphorus group. For example, a phospholipid can comprise a phosphorus-containing group and saturated or unsaturated alkyl group, optionally substituted with OH, COOH, oxo, amine, or substituted or unsubstituted aryl groups.

[0686] The term “alkyl” as used herein refers to a saturated aliphatic hydrocarbon, including straight-chain, branched-chain “isoalkyl”, and cyclic alkyl groups. The term “alkyl” also comprises alkoxy, alkyl-thio, alkyl-thio-alkyl, alkoxyalkyl, alkylamino, alkenyl, alkynyl, alkoxy, cycloalkenyl, cycloalkyl, cycloalkylalkyl, heterocycloalkyl, heteroaryl, C1-C6 hydrocarbyl, aryl or substituted aryl groups. Preferably, the alkyl group has 1 to 12 carbons. More preferably it is a lower alkyl of from about 1 to about 7 carbons, more preferably about 1 to about 4 carbons. The alkyl group can be substituted or unsubstituted. When substituted the substituted group(s) preferably comprise hydroxy, oxy, thio, amino, nitro, cyano, alkoxy, alkyl-thio, alkyl-thio-alkyl, alkoxyalkyl, alkylamino, silyl, alkenyl, alkynyl, alkoxy, cycloalkenyl, cycloalkyl, cycloalkylalkyl, heterocycloalkyl, heteroaryl, C1-C6 hydrocarbyl, aryl or substituted aryl groups. The term “alkyl” also includes alkenyl groups containing at least one carbon-carbon double bond, including straight-chain, branched-chain, and cyclic groups. Preferably, the alkenyl group has about 2 to about 12 carbons. More preferably it is a lower alkenyl of from about 2 to about 7 carbons, more preferably about 2 to about 4 carbons. The alkenyl group can be substituted or unsubstituted. When substituted the substituted group(s) preferably comprise hydroxy, oxy, thio, amino, nitro, cyano, alkoxy, alkyl-thio-alkyl, alkoxyalkyl, alkylamino, silyl, alkenyl, alkynyl, alkoxy, cycloalkenyl, cycloalkyl, cycloalkylalkyl, heterocycloalkyl, heteroaryl, C1-C6 hydrocarbyl, aryl or substituted aryl groups. The term “alkyl” also includes alkynyl groups containing at least one carbon-carbon triple bond, including straight-chain, branched-chain, and cyclic groups. Preferably, the alkynyl group has about 2 to about 12 carbons. More preferably it is a lower alkynyl of from about 2 to about 7 carbons, more preferably about 2 to about 4 carbons. The alkynyl group can be substituted or unsubstituted. When substituted the substituted group(s) preferably comprise hydroxy, oxy, thio, amino, nitro, cyano, alkoxy, alkyl-thio, alkyl-thio-alkyl, alkoxyalkyl, alkylamino, silyl, alkenyl, alkynyl, alkoxy, cycloalkenyl, cycloalkyl, cycloalkylalkyl, heterocycloalkyl, heteroaryl, C1-C6 hydrocarbyl, aryl or substituted aryl groups. Alkyl groups or moieties of the invention can also include aryl, alkylaryl, carbocyclic aryl, heterocyclic aryl, amide and ester groups. The preferred substituent(s) of aryl groups are halogen, trihalomethyl, hydroxyl, SH, OH, cyano, alkoxy, alkyl, alkenyl, alkynyl, and amino groups. An “alkylaryl” group refers to an alkyl group (as described above) covalently joined to an aryl group (as described above). Carbocyclic aryl groups are groups wherein the ring atoms on the aromatic ring are all carbon atoms. The carbon atoms are optionally substituted. Heterocyclic aryl groups are groups having from about 1 to about 3 heteroatoms as ring atoms in the aromatic ring and the remainder of the ring atoms are carbon atoms. Suitable heteroatoms include oxygen, sulfur, and nitrogen, and include furanyl, thienyl, pyridyl, pyrrolyl, N-lower alkyl pyrrolo, pyrimidyl, pyrazinyl, imidazolyl and the like, all optionally substituted. An “amide” refers to an —C(O)—NH—R, where R is either alkyl, aryl, alkylaryl or hydrogen. An “ester” refers to an —C(O)—OR′, where R is either alkyl, aryl, alkylaryl or hydrogen.

[0687] The term “alkoxyalkyl” as used herein refers to an alkyl-O-alkyl ether, for example, methoxyethyl or ethoxymethyl.

[0688] The term “alkyl-thio-alkyl” as used herein refers to an alkyl-S-alkyl thioether, for example, methylthiomethyl or methylthioethyl.

[0689] The term “amino” as used herein refers to a nitrogen containing group as is known in the art derived from ammonia by the replacement of one or more hydrogen radicals by organic radicals. For example, the terms “aminoacyl” and “aminoalkyl” refer to specific N-substituted organic radicals with acyl and alkyl substituent groups respectively.

[0690] The term “amination” as used herein refers to a process in which an amino group or substituted amine is introduced into an organic molecule.

[0691] The term “exocyclic amine protecting moiety” as used herein refers to a nucleobase amino protecting group compatible with oligonucleotide synthesis, for example, an acyl or amide group.

[0692] The term “alkenyl” as used herein refers to a straight or branched hydrocarbon of a designed number of carbon atoms containing at least one carbon-carbon double bond. Examples of “alkenyl” include vinyl, allyl, and 2-methyl-3-heptene.

[0693] The term “alkoxy” as used herein refers to an alkyl group of indicated number of carbon atoms attached to the parent molecular moiety through an oxygen bridge. Examples of alkoxy groups include, for example, methoxy, ethoxy, propoxy and isopropoxy.

[0694] The term “alkynyl” as used herein refers to a straight or branched hydrocarbon of a designed number of carbon atoms containing at least one carbon-carbon triple bond. Examples of “alkynyl” include propargyl, propyne, and 3-hexyne.

[0695] The term “aryl” as used herein refers to an aromatic hydrocarbon ring system containing at least one aromatic ring. The aromatic ring can optionally be fused or otherwise attached to other aromatic hydrocarbon rings or non-aromatic hydrocarbon rings. Examples of aryl groups include, for example, phenyl, naphthyl, 1,2,3,4-tetrahydronaphthalene and biphenyl. Preferred examples of aryl groups include phenyl and naphthyl.

[0696] The term “cycloalkenyl” as used herein refers to a C3-C8 cyclic hydrocarbon containing at least one carbon-carbon double bond. Examples of cycloalkenyl include cyclopropenyl, cyclobutenyl, cyclopentenyl, cyclopentadiene, cyclohexenyl, 1,3-cyclohexadiene, cycloheptenyl, cycloheptatrienyl, and cyclooctenyl.

[0697] The term “cycloalkyl” as used herein refers to a C3-C8 cyclic hydrocarbon. Examples of cycloalkyl include cyclopropyl, cyclobutyl, cyclopentyl, cyclohexyl, cycloheptyl and cyclooctyl.

[0698] The term “cycloalkylalkyl,” as used herein, refers to a C3-C7 cycloalkyl group attached to the parent molecular moiety through an alkyl group, as defined above. Examples of cycloalkylalkyl groups include cyclopropylmethyl and cyclopentylethyl.

[0699] The terms “halogen” or “halo” as used herein refers to indicate fluorine, chlorine, bromine, and iodine.

[0700] The term “heterocycloalkyl,” as used herein refers to a non-aromatic ring system containing at least one heteroatom selected from nitrogen, oxygen, and sulfur. The heterocycloalkyl ring can be optionally fused to or otherwise attached to other heterocycloalkyl rings and/or non-aromatic hydrocarbon rings. Preferred heterocycloalkyl groups have from 3 to 7 members. Examples of heterocycloalkyl groups include, for example, piperazine, morpholine, piperidine, tetrahydrofuran, pyrrolidine, and pyrazole. Preferred heterocycloalkyl groups include piperidinyl, piperazinyl, morpholinyl, and pyrolidinyl.

[0701] The term “heteroaryl” as used herein refers to an aromatic ring system containing at least one heteroatom selected from nitrogen, oxygen, and sulfur. The heteroaryl ring can be fused or otherwise attached to one or more heteroaryl rings, aromatic or non-aromatic hydrocarbon rings or heterocycloalkyl rings. Examples of heteroaryl groups include, for example, pyridine, furan, thiophene, 5,6,7,8-tetrahydroisoquinoline and pyrimidine. Preferred examples of heteroaryl groups include thienyl, benzothienyl, pyridyl, quinolyl, pyrazinyl, pyrimidyl, imidazolyl, benzimidazolyl, furanyl, benzofuranyl, thiazolyl, benzothiazolyl, isoxazolyl, oxadiazolyl, isothiazolyl, benzisothiazolyl, triazolyl, tetrazolyl, pyrrolyl, indolyl, pyrazolyl, and benzopyrazolyl.

[0702] The term “C1 -C6 hydrocarbyl” as used herein refers to straight, branched, or cyclic alkyl groups having 1-6 carbon atoms, optionally containing one or more carbon-carbon double or triple bonds. Examples of hydrocarbyl groups include, for example, methyl, ethyl, propyl, isopropyl, n-butyl, sec-butyl, tert-butyl, pentyl, 2-pentyl, isopentyl, neopentyl, hexyl, 2-hexyl, 3-hexyl, 3-methylpentyl, vinyl, 2-pentene, cyclopropylmethyl, cyclopropyl, cyclohexylmethyl, cyclohexyl and propargyl. When reference is made herein to C1-C6 hydrocarbyl containing one or two double or triple bonds it is understood that at least two carbons are present in the alkyl for one double or triple bond, and at least four carbons for two double or triple bonds.

[0703] The term “protecting group” as used herein, refers to groups known in the art that are readily introduced and removed from an atom, for example O, N, P, or S. Protecting groups are used to prevent undesirable reactions from taking place that can compete with the formation of a specific compound or intermediate of interest. See also “Protective Groups in Organic Synthesis”, 3rd Ed., 1999, Greene, T. W. and related publications.

[0704] The term “nitrogen protecting group,” as used herein, refers to groups known in the art that are readily introduced on to and removed from a nitrogen. Examples of nitrogen protecting groups include Boc, Cbz, benzoyl, and benzyl. See also “Protective Groups in Organic Synthesis”, 3rd Ed., 1999, Greene, T. W. and related publications.

[0705] The term “hydroxy protecting group,” or “hydroxy protection” as used herein, refers to groups known in the art that are readily introduced on to and removed from an oxygen, specifically an —OH group. Examples of hyroxy protecting groups include trityl or substituted trityl groups, such as monomethoxytrityl and dimethoxytrityl, or substituted silyl groups, such as tert-butyldimethyl, trimethylsilyl, or tert-butyldiphenyl silyl groups. See also “Protective Groups in Organic Synthesis”, 3rd Ed., 1999, Greene, T. W. and related publications.

[0706] The term “acyl” as used herein refers to —C(O)R groups, wherein R is an alkyl or aryl.

[0707] The term “phosphorus containing group” as used herein, refers to a chemical group containing a phosphorus atom. The phosphorus atom can be trivalent or pentavalent, and can be substituted with O, H, N, S, C or halogen atoms. Examples of phosphorus containing groups of the instant invention include but are not limited to phosphorus atoms substituted with O, H, N, S, C or halogen atoms, comprising phosphonate, alkylphosphonate, phosphate, diphosphate, triphosphate, pyrophosphate, phosphorothioate, phosphorodithioate, phosphoramidate, phosphoramidite groups, nucleotides and nucleic acid molecules.

[0708] The term “phosphine” or “phosphite” as used herein refers to a trivalent phosphorus species, for example compounds having Formula 97:

[chemical structure]

[0709] wherein R can include the groups:

[chemical structure]

[0710] and wherein S and T independently include the groups:

[chemical structure]

[0711] The term “phosphate” as used herein refers to a pentavalent phosphorus species, for example a compound having Formula 98:

[chemical structure]

[0712] wherein R includes the groups:

[chemical structure]

[0713] and wherein S and T each independently can be a sulfur or oxygen atom or a group which can include:

[chemical structure]

[0714] and wherein M comprises a sulfur or oxygen atom. The phosphate of the invention can comprise a nucleotide phosphate, wherein any R, S, or T in Formula 98 comprises a linkage to a nucleic acid or nucleoside.

[0715] The term “cationic salt” as used herein refers to any organic or inorganic salt having a net positive charge, for example a triethylammonium (TEA) salt.

[0716] The term “degradable linker” as used herein, refers to linker moieties that are capable of cleavage under various conditions. Conditions suitable for cleavage can include but are not limited to pH, UV irradiation, enzymatic activity, temperature, hydrolysis, elimination, and substitution reactions, and thermodynamic properties of the linkage.

[0717] The term “photolabile linker” as used herein, refers to linker moieties as are known in the art, that are selectively cleaved under particular UV wavelengths. Compounds of the invention containing photolabile linkers can be used to deliver compounds to a target cell or tissue of interest, and can be subsequently released in the presence of a UV source.

[0718] The term “nucleic acid conjugates” as used herein, refers to nucleoside, nucleotide and oligonucleotide conjugates.

[0719] The term “lipid” as used herein, refers to any lipophilic compound. Non-limiting examples of lipid compounds include fatty acids and their derivatives, including straight chain, branched chain, saturated and unsaturated fatty acids, carotenoids, terpenes, bile acids, and steroids, including cholesterol and derivatives or analogs thereof.

[0720] The term “folate” as used herein, refers to analogs and derivatives of folic acid, for example antifolates, dihydrofloates, tetrahydrofolates, tetrahydorpterins, folinic acid, pteropolyglutamic acid, 1-deza, 3-deaza, 5-deaza, 8-deaza, 10-deaza, 1,5-deaza, 5,10 dideaza, 8,10-dideaza, and 5,8-dideaza folates, antifolates, and pteroic acid derivatives.

[0721] The term “compounds with neutral charge” as used herein, refers to compositions which are neutral or uncharged at neutral or physiological pH. Examples of such compounds are cholesterol and other steroids, cholesteryl hemisuccinate (CHEMS), dioleoyl phosphatidyl choline, distearoylphosphotidyl choline (DSPC), fatty acids such as oleic acid, phosphatidic acid and its derivatives, phosphatidyl serine, polyethylene glycol conjugated phosphatidylamine, phosphatidylcholine, phosphatidylethanolamine and related variants, prenylated compounds including farnesol, polyprenols, tocopherol, and their modified forms, diacylsuccinyl glycerols, fusogenic or pore forming peptides, dioleoylphosphotidylethanolamine (DOPE), ceramide and the like.

[0722] The term “lipid aggregate” as used herein refers to a lipid-containing composition wherein the lipid is in the form of a liposome, micelle (non-lamellar phase) or other aggregates with one or more lipids.

[0723] The term “nitrogen containing group” as used herein refers to any chemical group or moiety comprising a nitrogen or substituted nitrogen. Non-limiting examples of nitrogen containing groups include amines, substituted amines, amides, alkylamines, amino acids such as arginine or lysine, polyamines such as spermine or spermidine, cyclic amines such as pyridines, pyrimidines including uracil, thymine, and cytosine, morpholines, phthalimides, and heterocyclic amines such as purines, including guanine and adenine.

[0724] Therapeutic nucleic acid molecules (e.g., siNA molecules) delivered exogenously optimally are stable within cells until reverse transcription of the RNA has been modulated long enough to reduce the levels of the RNA transcript. The nucleic acid molecules are resistant to nucleases in order to function as effective intracellular therapeutic agents. Improvements in the chemical synthesis of nucleic acid molecules described in the instant invention and in the art have expanded the ability to modify nucleic acid molecules by introducing nucleotide modifications to enhance their nuclease stability as described above.

[0725] In yet another embodiment, siNA molecules having chemical modifications that maintain or enhance enzymatic activity of proteins involved in RNAi are provided. Such nucleic acids are also generally more resistant to nucleases than unmodified nucleic acids. Thus, in vitro and/or in vivo the activity should not be significantly lowered.

[0726] Use of the nucleic acid-based molecules of the invention will lead to better treatment of the disease progression by affording the possibility of combination therapies (e.g., multiple siNA molecules targeted to different genes; nucleic acid molecules coupled with known small molecule modulators; or intermittent treatment with combinations of molecules, including different motifs and/or other chemical or biological molecules). The treatment of subjects with siNA molecules can also include combinations of different types of nucleic acid molecules, such as enzymatic nucleic acid molecules (ribozymes), allozymes, antisense, 2,5-A oligoadenylate, decoys, and aptamers.

[0727] In another aspect a siNA molecule of the invention comprises one or more 5′ and/or a 3′-cap structure, for example on only the sense siNA strand, the antisense siNA strand, or both siNA strands.

[0728] By “cap structure” is meant chemical modifications, which have been incorporated at either terminus of the oligonucleotide (see, for example, Adamic et al., U.S. Pat. No. 5,998,203, incorporated by reference herein). These terminal modifications protect the nucleic acid molecule from exonuclease degradation, and can help in delivery and/or localization within a cell. The cap can be present at the 5′-terminus (5′-cap) or at the 3′-terminal (3′-cap) or can be present on both termini. Non-limiting examples of the 5′-cap include, but are not limited to, glyceryl, inverted deoxy abasic residue (moiety); 4′,5′-methylene nucleotide; 1-(beta-D-erythrofuranosyl) nucleotide, 4′-thio nucleotide; carbocyclic nucleotide; 1,5-anhydrohexitol nucleotide; L-nucleotides; alpha-nucleotides; modified base nucleotide; phosphorodithioate linkage; threo-pentofuranosyl nucleotide; acyclic 3′,4′-seco nucleotide; acyclic 3,4-dihydroxybutyl nucleotide; acyclic 3,5-dihydroxypentyl nucleotide, 3′-3′-inverted nucleotide moiety; 3′-3′-inverted abasic moiety; 3′-2′-inverted nucleotide moiety; 3′-2′-inverted abasic moiety; 1,4-butanediol phosphate; 3′-phosphoramidate; hexylphosphate; aminohexyl phosphate; 3′-phosphate; 3′-phosphorothioate; phosphorodithioate; or bridging or non-bridging methylphosphonate moiety.

[0729] Non-limiting examples of the 3′-cap include, but are not limited to, glyceryl, inverted deoxy abasic residue (moiety), 4′,5′-methylene nucleotide; 1-(beta-D-erythrofuranosyl) nucleotide; 4′-thio nucleotide, carbocyclic nucleotide; 5′-amino-alkyl phosphate; 1,3-diamino-2-propyl phosphate; 3-aminopropyl phosphate; 6-aminohexyl phosphate; 1,2-aminododecyl phosphate; hydroxypropyl phosphate; 1,5-anhydrohexitol nucleotide; L-nucleotide; alpha-nucleotide; modified base nucleotide; phosphorodithioate; threo-pentofuranosyl nucleotide; acyclic 3′,4′-seco nucleotide; 3,4-dihydroxybutyl nucleotide; 3,5-dihydroxypentyl nucleotide, 5′-5′-inverted nucleotide moiety; 5′-5′-inverted abasic moiety; 5′-phosphoramidate; 5′-phosphorothioate; 1,4-butanediol phosphate;

[0730] 5′-amino; bridging and/or non-bridging 5′-phosphoramidate, phosphorothioate and/or phosphorodithioate, bridging or non bridging methylphosphonate and 5′-mercapto moieties (for more details see Beaucage and Iyer, 1993, Tetrahedron 49, 1925; incorporated by reference herein).

[0731] By the term “non-nucleotide” is meant any group or compound which can be incorporated into a nucleic acid chain in the place of one or more nucleotide units, including either sugar and/or phosphate substitutions, and allows the remaining bases to exhibit their enzymatic activity. The group or compound is abasic in that it does not contain a commonly recognized nucleotide base, such as adenosine, guanine, cytosine, uracil or thymine and therefore lacks a base at the 1′-position.

[0732] By “nucleotide” as used herein is as recognized in the art to include natural bases (standard), and modified bases well known in the art. Such bases are generally located at the 1′ position of a nucleotide sugar moiety. Nucleotides generally comprise a base, sugar and a phosphate group. The nucleotides can be unmodified or modified at the sugar, phosphate and/or base moiety, (also referred to interchangeably as nucleotide analogs, modified nucleotides, non-natural nucleotides, non-standard nucleotides and other; see, for example, Usman and McSwiggen, supra; Eckstein et al., International PCT Publication No. WO 92/07065; Usman et al., International PCT Publication No. WO 93/15187; Uhlman & Peyman, supra, all are hereby incorporated by reference herein). There are several examples of modified nucleic acid bases known in the art as summarized by Limbach et al., 1994, Nucleic Acids Res. 22, 2183. Some of the non-limiting examples of base modifications that can be introduced into nucleic acid molecules include, inosine, purine, pyridin-4-one, pyridin-2-one, phenyl, pseudouracil, 2, 4, 6-trimethoxy benzene, 3-methyl uracil, dihydrouridine, naphthyl, aminophenyl, 5-alkylcytidines (e.g., 5-methylcytidine), 5-alkyluridines (e.g., ribothymidine), 5-halouridine (e.g., 5-bromouridine) or 6-azapyrimidines or 6-alkylpyrimidines (e.g., 6-methyluridine), propyne, and others (Burgin et al., 1996, Biochemistry, 35, 14090; Uhlman & Peyman, supra). By “modified bases” in this aspect is meant nucleotide bases other than adenine, guanine, cytosine and uracil at 1′ position or their equivalents.

[0733] In one embodiment, the invention features modified siNA molecules, with phosphate backbone modifications comprising one or more phosphorothioate, phosphonoacetate, and/or thiophosphonoacetate, phosphorodithioate, methylphosphonate, phosphotriester, morpholino, amidate carbamate, carboxymethyl, acetamidate, polyamide, sulfonate, sulfonamide, sulfamate, formacetal, thioformacetal, and/or alkylsilyl, substitutions. For a review of oligonucleotide backbone modifications, see Hunziker and Leumann, 1995, Nucleic Acid Analogues: Synthesis and Properties, in Modern Synthetic Methods, VCH, 331-417, and Mesmaeker et al., 1994, Novel Backbone Replacements for Oligonucleotides, in Carbohydrate Modifications in Antisense Research, ACS, 24-39.

[0734] By “abasic” is meant sugar moieties lacking, a base or having other chemical groups in place of a base at the 1′ position, see for example Adamic et al., U.S. Pat. No. 5,998,203.

[0735] By “unmodified nucleoside” is meant one of the bases adenine, Cytosine, guanine, thymine, or uracil joined to the 1′ carbon of β-D-ribo-furanose.

[0736] By “modified nucleoside” is meant any nucleotide base which contains a modification in the chemical structure of an unmodified nucleotide base, sugar and/or phosphate. Non-limiting examples of modified nucleotides are shown by Formulae I-VII and/or other modifications described herein.

[0737] In connection with 2′-modified nucleotides as described for the present invention, by “amino” is meant 2′-NH₂ or 2′-O—NH₂, which can be modified or unmodified. Such modified groups are described, for example, in Eckstein et al., U.S. Pat. No. 5,672,695 and Matulic-Adamic et al., U.S. Pat. No. 6,248,878, which are both incorporated by reference in their entireties.

[0738] Various modifications to nucleic acid sNA structure can be made to enhance the utility of these molecules. Such modifications will enhance shelf-life, half-life in vitro, stability, and ease of introduction of such oligonucleotides to the target site, e.g., to enhance penetration of cellular membranes, and confer the ability to recognize and bind to targeted cells.

### Administration of Nucleic Acid Molecules

[0739] A siNA molecule of the invention can be adapted for use to treat any disease, infection or condition associated with gene expression, and other indications that can respond to the level of gene product in a cell or tissue, alone or in combination with other therapies. Non-limiting examples of such diseases and conditions include cancer or cancerous disease, infectious disease, cardiovascular disease, neurologic disease, ocular disease, prion disease, inflammatory disease, autoimmune disease, pulmonary disease, renal disease, liver disease, mitochondrial disease, endocrine disease, reproduction related diseases and conditions as are known in the art, and any other indications that can respond to the level of an expressed gene product in a cell or organism (see for example McSwiggen, International PCT Publication No. WO 03/74654). For example, a siNA molecule can comprise a delivery vehicle, including liposomes, for administration to a subject, carriers and diluents and their salts, and/or can be present in pharmaceutically acceptable formulations. Methods for the delivery of nucleic acid molecules are described in Akhtar et al., 1992, Trends Cell Bio., 2, 139; Delivery Strategies for Antisense Oligonucleotide Therapeutics, ed. Akhtar, 1995, Maurer et al., 1999, Mol. Membr. Biol., 16, 129-140; Hofland and Huang, 1999, Handb. Exp. Pharmacol., 137, 165-192; and Lee et al., 2000, ACS Symp. Ser., 752, 184-192, all of which are incorporated herein by reference. Beigelman et al., U.S. Pat. No. 6,395,713 and Sullivan et al., PCT WO 94/02595 further describe the general methods for delivery of nucleic acid molecules. These protocols can be utilized for the delivery of virtually any nucleic acid molecule. Nucleic acid molecules can be administered to cells by a variety of methods known to those of skill in the art, including, but not restricted to, encapsulation in liposomes, by iontophoresis, or by incorporation into other vehicles, such as biodegradable polymers, hydrogels, cyclodextrins (see for example Gonzalez et al., 1999, Bioconjugate Chem., 10, 1068-1074; Wang et al., International PCT publication Nos. WO 03/47518 and WO 03/46185), poly(lactic-co-glycolic)acid (PLGA) and PLCA microspheres (see for example U.S. Pat. No. 6,447,796 and US Patent Application Publication No. US 2002130430), biodegradable nanocapsules, and bioadhesive microspheres, or by proteinaceous vectors (O'Hare and Normand, International PCT Publication No. WO 00/53722). In one embodiment, nucleic acid molecules or the invention are administered via biodegradable implant materials, such as elastic shape memory polymers (see for example Lendelein and Langer, 2002, Science, 296, 1673). In another embodiment, the nucleic acid molecules of the invention can also be formulated or complexed with polyethyleneimine and derivatives thereof, such as polyethyleneimine-polyethyleneglycol-N-acetylgalactosamine (PEI-PEG-GAL) or polyethyleneimine-polyethyleneglycol-tri-N-acetylgalactosamine (PEI-PEG-triGAL) derivatives. Alternatively, the nucleic acid/vehicle combination is locally delivered by direct injection or by use of an infusion pump. Direct injection of the nucleic acid molecules of the invention, whether subcutaneous, intramuscular, or intradermal, can take place using standard needle and syringe methodologies, or by needle-free technologies such as those described in Conry et al., 1999, Clin. Cancer Res., 5, 2330-2337 and Barry et al., International PCT Publication No. WO 99/31262. Many examples in the art describe CNS delivery methods of oligonucleotides by osmotic pump, (see Chun et al., 1998, Neuroscience Letters, 257, 135-138, D'Aldin et al., 1998, Mol. Brain Research, 55, 151-164, Dryden et al., 1998, J. Endocrinol., 157, 169-175, Ghirnikar et al., 1998, Neuroscience Letters, 247, 21-24) or direct infusion (Broaddus et al., 1997, Neurosurg. Focus, 3, article 4). Other routes of delivery include, but are not limited to oral (tablet or pill form) and/or intrathecal delivery (Gold, 1997, Neuroscience, 76, 1153-1158). More detailed descriptions of nucleic acid delivery and administration are provided in Sullivan et al., supra, Draper et al., PCT WO93/23569, Beigelman et al., PCT WO99/05094, and Klimuk et al., PCT WO99/04819 all of which have been incorporated by reference herein. The molecules of the instant invention can be used as pharmaceutical agents. Pharmaceutical agents prevent, modulate the occurrence, or treat (alleviate a symptom to some extent, preferably all of the symptoms) of a disease state in a subject.

[0740] In addition, the invention features the use of methods to deliver the nucleic acid molecules of the instant invention to the central nervous system and/or peripheral nervous system. Experiments have demonstrated the efficient in vivo uptake of nucleic acids by neurons. As an example of local administration of nucleic acids to nerve cells, Sommer et al., 1998, Antisense Nuc. Acid Drug Dev., 8, 75, describe a study in which a 15mer phosphorothioate antisense nucleic acid molecule to c-fos is administered to rats via microinjection into the brain. Antisense molecules labeled with tetramethylrhodamine-isothiocyanate (TRITC) or fluorescein isothiocyanate (FITC) were taken up by exclusively by neurons thirty minutes post-injection. A diffuse cytoplasmic staining and nuclear staining was observed in these cells. As an example of systemic administration of nucleic acid to nerve cells, Epa et al., 2000, Antisense Nuc. Acid Drug Dev., 10, 469, describe an in vivo mouse study in which beta-cyclodextrin-adamantane-oligonucleotide conjugates were used to target the p75 neurotrophin receptor in neuronally differentiated PC12 cells. Following a two week course of IP administration, pronounced uptake of p75 neurotrophin receptor antisense was observed in dorsal root ganglion (DRG) cells. In addition, a marked and consistent down-regulation of p75 was observed in DRG neurons. Additional approaches to the targeting of nucleic acid to neurons are described in Broaddus et al., 1998, J. Neurosurg., 88(4), 734; Karle et al., 1997, Eur. J. Pharmocol., 340(2/3), 153; Bannai et al., 1998, Brain Research, 784(1,2), 304; Rajakumar et al., 1997, Synapse, 26(3), 199; Wu-pong et al., 1999, BioPharm, 12(1), 32; Bannai et al., 1998, Brain Res. Protoc., 3(1), 83; Simantov et al., 1996, Neuroscience, 74(1), 39. Nucleic acid molecules of the invention are therefore amenable to delivery to and uptake by cells that express repeat expansion allelic variants for modulation of RE gene expression. The delivery of nucleic acid molecules of the invention, targeting RE is provided by a variety of different strategies. Traditional approaches to CNS delivery that can be used include, but are not limited to, intrathecal and intracerebroventricular administration, implantation of catheters and pumps, direct injection or perfusion at the site of injury or lesion, injection into the brain arterial system, or by chemical or osmotic opening of the blood-brain barrier. Other approaches can include the use of various transport and carrier systems, for example though the use of conjugates and biodegradable polymers. Furthermore, gene therapy approaches, for example as described in Kaplitt et al., U.S. Pat. No. 6,180,613 and Davidson, WO 04/013280, can be used to express nucleic acid molecules in the CNS.

[0741] In addition, the invention features the use of methods to deliver the nucleic acid molecules of the instant invention to hematopoietic cells, including monocytes and lymphocytes. These methods are described in detail by Hartmann et al., 1998, J. Pharmacol. Exp. Ther., 285(2), 920-928; Kronenwett et al., 1998, Blood, 91(3), 852-862; Filion and Phillips, 1997, Biochim. Biophys. Acta., 1329(2), 345-356; Ma and Wei, 1996, Leuk. Res., 20(11/12), 925-930; and Bongartz et al., 1994, Nucleic Acids Research, 22(22), 4681-8. Such methods, as described above, include the use of free oligonucleotide, cationic lipid formulations, liposome formulations including pH sensitive liposomes and immunoliposomes, and bioconjugates including oligonucleotides conjugated to fusogenic peptides, for the transfection of hematopoietic cells with oligonucleotides.

[0742] In one embodiment, a compound, molecule, or composition for the treatment of ocular conditions (e.g., macular degeneration, diabetic retinopathy etc.) is administered to a subject intraocularly or by intraocular means. In another embodiment, a compound, molecule, or composition for the treatment of ocular conditions (e.g., macular degeneration, diabetic retinopathy etc.) is administered to a subject periocularly or by periocular means (see for example Ahlheim et al., International PCT publication No. WO 03/24420). In one embodiment, a siNA molecule and/or formulation or composition thereof is administered to a subject intraocularly or by intraocular means. In another embodiment, a siNA molecule and/or formulation or composition thereof is administered to a subject periocularly or by periocular means. Periocular administration generally provides a less invasive approach to administering siNA molecules and formulation or composition thereof to a subject (see for example Ahlheim et al., International PCT publication No. WO 03/24420). The use of periocular administration also minimizes the risk of retinal detachment, allows for more frequent dosing or administration, provides a clinically relevant route of administration for macular degeneration and other optic conditions, and also provides the possibility of using reservoirs (e.g., implants, pumps or other devices) for drug delivery.

[0743] In one embodiment, the siNA molecules of the invention and formulations or compositions thereof are administered directly or topically (e.g., locally) to the dermis or follicles as is generally known in the art (see for example Brand, 2001, Curr. Opin. Mol. Ther., 3, 244-8; Regnier et al., 1998, J. Drug Target, 5, 275-89; Kanikkannan, 2002, BioDrugs, 16, 339-47; Wraight et al., 2001, Pharmacol. Ther., 90, 89-104; and Preat and Dujardin, 2001, STP PharmaSciences, 11, 57-68.

[0744] In one embodiment, dermal delivery systems of the invention include, for example, aqueous and nonaqueous gels, creams, multiple emulsions, microemulsions, liposomes, ointments, aqueous and nonaqueous solutions, lotions, aerosols, hydrocarbon bases and powders, and can contain excipients such as solubilizers, permeation enhancers (e.g., fatty acids, fatty acid esters, fatty alcohols and amino acids), and hydrophilic polymers (e.g., polycarbophil and polyvinylpyrolidone). In one embodiment, the pharmaceutically acceptable carrier is a liposome or a transdermal enhancer. Examples of liposomes which can be used in this invention include the following: (1) CellFectin, 1:1.5 (M/M) liposome formulation of the cationic lipid N,NI,NII,NIII-tetramethyl-N,NI,NII,NIII-tetrapalmit-y-spermine and dioleoyl phosphatidylethanolamine (DOPE) (GIBCO BRL); (2) Cytofectin GSV, 2:1 (M/M) liposome formulation of a cationic lipid and DOPE (Glen Research); (3) DOTAP (N-[1-(2,3-dialeoyloxy)-N,N,N-tri-methyl-ammoniummethylsulfate) (Boehringer Manheim); and (4) Lipofectamine, 3:1 (M/M) liposome formulation of the polycationic lipid DOSPA and the neutral lipid DOPE (GIBCO BRL).

[0745] In one embodiment, transmucosal delivery systems of the invention include patches, tablets, suppositories, pessaries, gels and creams, and can contain excipients such as solubilizers and enhancers (e.g., propylene glycol, bile salts and amino acids), and other vehicles (e.g., polyethylene glycol, fatty acid esters and derivatives, and hydrophilic polymers such as hydroxypropylmethylcellulose and hyaluronic acid).

[0746] In one embodiment, nucleic acid molecules of the invention are administered to the central nervous system (CNS) or peripheral nervous system (PNS). Experiments have demonstrated the efficient in vivo uptake of nucleic acids by neurons. As an example of local administration of nucleic acids to nerve cells, Sommer et al., 1998, Antisense Nuc. Acid Drug Dev., 8, 75, describe a study in which a 15mer phosphorothioate antisense nucleic acid molecule to c-fos is administered to rats via microinjection into the brain. Antisense molecules labeled with tetramethylrhodamine-isothiocyanate (TRITC) or fluorescein isothiocyanate (FITC) were taken up by exclusively by neurons thirty minutes post-injection. A diffuse cytoplasmic staining and nuclear staining was observed in these cells. As an example of systemic administration of nucleic acid to nerve cells, Epa et al., 2000, Antisense Nuc. Acid Drug Dev., 10, 469, describe an in vivo mouse study in which beta-cyclodextrin-adamantane-oligonucleotide conjugates were used to target the p75 neurotrophin receptor in neuronally differentiated PC12 cells. Following a two week course of IP administration, pronounced uptake of p75 neurotrophin receptor antisense was observed in dorsal root ganglion (DRG) cells. In addition, a marked and consistent down-regulation of p75 was observed in DRG neurons. Additional approaches to the targeting of nucleic acid to neurons are described in Broaddus et al., 1998, J. Neurosurg., 88(4), 734; Karle et al., 1997, Eur. J. Pharmocol., 340(2/3), 153; Bannai et al., 1998, Brain Research, 784(1,2), 304; Rajakumar et al., 1997, Synapse, 26(3), 199; Wu-pong et al., 1999, BioPharm, 12(1), 32; Bannai et al., 1998, Brain Res. Protoc., 3(1), 83; Simantov et al., 1996, Neuroscience, 74(1), 39. Nucleic acid molecules of the invention are therefore amenable to delivery to and uptake by cells in the CNS and/or PNS.

[0747] The delivery of nucleic acid molecules of the invention to the CNS is provided by a variety of different strategies. Traditional approaches to CNS delivery that can be used include, but are not limited to, intrathecal and intracerebroventricular administration, implantation of catheters and pumps, direct injection or perfusion at the site of injury or lesion, injection into the brain arterial system, or by chemical or osmotic opening of the blood-brain barrier. Other approaches can include the use of various transport and carrier systems, for example though the use of conjugates and biodegradable polymers. Furthermore, gene therapy approaches, for example as described in Kaplitt et al., U.S. Pat. No. 6,180,613 and Davidson, WO 04/013280, can be used to express nucleic acid molecules in the CNS.

[0748] In one embodiment, the nucleic acid molecules of the invention are administered via pulmonary delivery, such as by inhalation of an aerosol or spray dried formulation administered by an inhalation device or nebulizer, providing rapid local uptake of the nucleic acid molecules into relevant pulmonary tissues. Solid particulate compositions containing respirable dry particles of micronized nucleic acid compositions can be prepared by grinding dried or lyophilized nucleic acid compositions, and then passing the micronized composition through, for example, a 400 mesh screen to break up or separate out large agglomerates. A solid particulate composition comprising the nucleic acid compositions of the invention can optionally contain a dispersant which serves to facilitate the formation of an aerosol as well as other therapeutic compounds. A suitable dispersant is lactose, which can be blended with the nucleic acid compound in any suitable ratio, such as a 1 to 1 ratio by weight.

[0749] Aerosols of liquid particles comprising a nucleic acid composition of the invention can be produced by any suitable means, such as with a nebulizer (see for example U.S. Pat. No. 4,501,729). Nebulizers are commercially available devices which transform solutions or suspensions of an active ingredient into a therapeutic aerosol mist either by means of acceleration of a compressed gas, typically air or oxygen, through a narrow venturi orifice or by means of ultrasonic agitation. Suitable formulations for use in nebulizers comprise the active ingredient in a liquid carrier in an amount of up to 40% w/w preferably less than 20% w/w of the formulation. The carrier is typically water or a dilute aqueous alcoholic solution, preferably made isotonic with body fluids by the addition of, for example, sodium chloride or other suitable salts. Optional additives include preservatives if the formulation is not prepared sterile, for example, methyl hydroxybenzoate, anti-oxidants, flavorings, volatile oils, buffering agents and emulsifiers and other formulation surfactants. The aerosols of solid particles comprising the active composition and surfactant can likewise be produced with any solid particulate aerosol generator. Aerosol generators for administering solid particulate therapeutics to a subject produce particles which are respirable, as explained above, and generate a volume of aerosol containing a predetermined metered dose of a therapeutic composition at a rate suitable for human administration. One illustrative type of solid particulate aerosol generator is an insufflator. Suitable formulations for administration by insufflation include finely comminuted powders which can be delivered by means of an insufflator. In the insufflator, the powder, e.g., a metered dose thereof effective to carry out the treatments described herein, is contained in capsules or cartridges, typically made of gelatin or plastic, which are either pierced or opened in situ and the powder delivered by air drawn through the device upon inhalation or by means of a manually-operated pump. The powder employed in the insufflator consists either solely of the active ingredient or of a powder blend comprising the active ingredient, a suitable powder diluent, such as lactose, and an optional surfactant. The active ingredient typically comprises from 0.1 to 100 w/w of the formulation. A second type of illustrative aerosol generator comprises a metered dose inhaler. Metered dose inhalers are pressurized aerosol dispensers, typically containing a suspension or solution formulation of the active ingredient in a liquified propellant. During use these devices discharge the formulation through a valve adapted to deliver a metered volume to produce a fine particle spray containing the active ingredient. Suitable propellants include certain chlorofluorocarbon compounds, for example, dichlorodifluoromethane, trichlorofluoromethane, dichlorotetrafluoroethane and mixtures thereof. The formulation can additionally contain one or more co-solvents, for example, ethanol, emulsifiers and other formulation surfactants, such as oleic acid or sorbitan trioleate, anti-oxidants and suitable flavoring agents. Other methods for pulmonary delivery are described in, for example US Patent Application No. 20040037780, and U.S. Pat. Nos. 6,592,904; 6,582,728; 6,565,885.

[0750] In one embodiment, a siNA molecule of the invention is complexed with membrane disruptive agents such as those described in U.S. Patent Application Publication No. 20010007666, incorporated by reference herein in its entirety including the drawings. In another embodiment, the membrane disruptive agent or agents and the siNA molecule are also complexed with a cationic lipid or helper lipid molecule, such as those lipids described in U.S. Pat. No. 6,235,310, incorporated by reference herein in its entirety including the drawings.

[0751] In one embodiment, siNA molecules of the invention are formulated or complexed with polyethylenimine (e.g., linear or branched PEI) and/or polyethylenimine derivatives, including for example grafted PEIs such as galactose PEI, cholesterol PEI, antibody derivatized PEI, and polyethylene glycol PEI (PEG-PEI) derivatives thereof (see for example Ogris et al., 2001, AAPA PharmSci, 3, 1-11; Furgeson et al., 2003, Bioconjugate Chem., 14, 840-847; Kunath et al., 2002, Phramaceutical Research, 19, 810-817; Choi et al., 2001, Bull. Korean Chem. Soc., 22, 46-52; Bettinger et al., 1999, Bioconjugate Chem., 10, 558-561; Peterson et al., 2002, Bioconjugate Chem., 13, 845-854; Erbacher et al., 1999, Journal of Gene Medicine Preprint, 1, 1-18; Godbey et al., 1999., PNAS USA, 96, 5177-5181; Godbey et al., 1999, Journal of Controlled Release, 60, 149-160; Diebold et al., 1999, Journal of Biological Chemistry, 274, 19087-19094; Thomas and Klibanov, 2002, PNAS USA, 99, 14640-14645; and Sagara, U.S. Pat. No. 6,586,524, incorporated by reference herein.

[0752] In one embodiment, a siNA molecule of the invention comprises a bioconjugate, for example a nucleic acid conjugate as described in Vargeese et al., U.S. Ser. No. 10/427,160, filed Apr. 30, 2003; U.S. Pat. No. 6,528,631; U.S. Pat. No. 6,335,434; U.S. Pat. No. 6, 235,886; U.S. Pat. No. 6,153,737; U.S. Pat. No. 5,214,136; U.S. Pat. No. 5,138,045, all incorporated by reference herein.

[0753] Thus, the invention features a pharmaceutical composition comprising one or more nucleic acid(s) of the invention in an acceptable carrier, such as a stabilizer, buffer, and the like. The polynucleotides of the invention can be administered (e.g., RNA, DNA or protein) and introduced into a subject by any standard means, with or without stabilizers, buffers, and the like, to form a pharmaceutical composition. When it is desired to use a liposome delivery mechanism, standard protocols for formation of liposomes can be followed. The compositions of the present invention can also be formulated and used as tablets, capsules or elixirs for oral administration, suppositories for rectal administration, sterile solutions, suspensions for injectable administration, and the other compositions known in the art.

[0754] The present invention also includes pharmaceutically acceptable formulations of the compounds described. These formulations include salts of the above compounds, e.g., acid addition salts, for example, salts of hydrochloric, hydrobromic, acetic acid, and benzene sulfonic acid.

[0755] A pharmacological composition or formulation refers to a composition or formulation in a form suitable for administration, e.g., systemic administration, into a cell or subject, including for example a human. Suitable forms, in part, depend upon the use or the route of entry, for example oral, transdermal, or by injection. Such forms should not prevent the composition or formulation from reaching a target cell (i.e., a cell to which the negatively charged nucleic acid is desirable for delivery). For example, pharmacological compositions injected into the blood stream should be soluble. Other factors are known in the art, and include considerations such as toxicity and forms that prevent the composition or formulation from exerting its effect.

[0756] By “systemic administration” is meant in vivo systemic absorption or accumulation of drugs in the blood stream followed by distribution throughout the entire body. Administration routes that lead to systemic absorption include, without limitation: intravenous, subcutaneous, intraperitoneal, inhalation, oral, intrapulmonary and intramuscular. Each of these administration routes exposes the siNA molecules of the invention to an accessible diseased tissue. The rate of entry of a drug into the circulation has been shown to be a function of molecular weight or size. The use of a liposome or other drug carrier comprising the compounds of the instant invention can potentially localize the drug, for example, in certain tissue types, such as the tissues of the reticular endothelial system (RES). A liposome formulation that can facilitate the association of drug with the surface of cells, such as, lymphocytes and macrophages is also useful. This approach can provide enhanced delivery of the drug to target cells by taking advantage of the specificity of macrophage and lymphocyte immune recognition of abnormal cells, such as cancer cells.

[0757] By “pharmaceutically acceptable formulation” is meant a composition or formulation that allows for the effective distribution of the nucleic acid molecules of the instant invention in the physical location most suitable for their desired activity. Non-limiting examples of agents suitable for formulation with the nucleic acid molecules of the instant invention include: P-glycoprotein inhibitors (such as Pluronic P85), which can enhance entry of drugs into the CNS (Jolliet-Riant and Tillement, 1999, Fundam. Clin. Pharmacol., 13; 16-26); biodegradable polymers, such as poly (DL-lactide-coglycolide) microspheres for sustained release delivery after intracerebral implantation (Emerich, D F et al, 1999, Cell Transplant, 8, 47-58) (Alkermes, Inc. Cambridge, Mass.); and loaded nanoparticles, such as those made of polybutylcyanoacrylate, which can deliver drugs across the blood brain barrier and can alter neuronal uptake mechanisms (Prog Neuropsychopharmacol Biol Psychiatry, 23, 941-949, 1999). Other non-limiting examples of delivery strategies for the nucleic acid molecules of the instant invention include material described in Boado et al., 1998, J. Pharm. Sci., 87, 1308-1315; Tyler et al., 1999, FEBS Lett., 421, 280-284; Pardridge et al., 1995, PNAS USA., 92, 5592-5596; Boado, 1995, Adv. Drug Delivery Rev., 15, 73-107; Aldrian-Herrada et al., 1998, Nucleic Acids Res., 26, 4910-4916; and Tyler et al., 1999, PNAS USA., 96, 7053-7058.

[0758] The invention also features the use of the composition comprising surface-modified liposomes containing poly (ethylene glycol) lipids (PEG-modified, or long-circulating liposomes or stealth liposomes). These formulations offer a method for increasing the accumulation of drugs in target tissues. This class of drug carriers resists opsonization and elimination by the mononuclear phagocytic system (MPS or RES), thereby enabling longer blood circulation times and enhanced tissue exposure for the encapsulated drug (Lasic et al. Chem. Rev. 1995, 95, 2601-2627; Ishiwata et al., Chem. Pharm. Bull. 1995, 43, 1005-1011). Such liposomes have been shown to accumulate selectively in tumors, presumably by extravasation and capture in the neovascularized target tissues (Lasic et al., Science 1995, 267, 1275-1276; Oka et al.,1995, Biochim. Biophys. Acta, 1238, 86-90). The long-circulating liposomes enhance the pharmacokinetics and pharmacodynamics of DNA and RNA, particularly compared to conventional cationic liposomes which are known to accumulate in tissues of the MPS (Liu et al., J. Biol. Chem. 1995, 42, 24864-24870; Choi et al., International PCT Publication No. WO 96/10391; Ansell et al., International PCT Publication No. WO 96/10390; Holland et al., International PCT Publication No. WO 96/10392). Long-circulating liposomes are also likely to protect drugs from nuclease degradation to a greater extent compared to cationic liposomes, based on their ability to avoid accumulation in metabolically aggressive MPS tissues such as the liver and spleen.

[0759] The present invention also includes compositions prepared for storage or administration that include a pharmaceutically effective amount of the desired compounds in a pharmaceutically acceptable carrier or diluent. Acceptable carriers or diluents for therapeutic use are well known-in the pharmaceutical art, and are described, for example, in Remington's Pharmaceutical Sciences, Mack Publishing Co. (A. R. Gennaro edit. 1985), hereby incorporated by reference herein. For example, preservatives, stabilizers, dyes and flavoring agents can be provided. These include sodium benzoate, sorbic acid and esters of p-hydroxybenzoic acid. In addition, antioxidants and suspending agents can be used.

[0760] A pharmaceutically effective dose is that dose required to prevent, inhibit the occurrence, or treat (alleviate a symptom to some extent, preferably all of the symptoms) of a disease state. The pharmaceutically effective dose depends on the type of disease, the composition used, the route of administration, the type of mammal being treated, the physical characteristics of the specific mammal under consideration, concurrent medication, and other factors that those skilled in the medical arts will recognize. Generally, an amount between 0.1 mg/kg and 100 mg/kg body weight/day of active ingredients is administered dependent upon potency of the negatively charged polymer.

[0761] The nucleic acid molecules of the invention and formulations thereof can be administered orally, topically, parenterally, by inhalation or spray, or rectally in dosage unit formulations containing conventional non-toxic pharmaceutically acceptable carriers, adjuvants and/or vehicles. The term parenteral as used herein includes percutaneous, subcutaneous, intravascular (e.g., intravenous), intramuscular, or intrathecal injection or infusion techniques and the like. In addition, there is provided a pharmaceutical formulation comprising a nucleic acid molecule of the invention and a pharmaceutically acceptable carrier. One or more nucleic acid molecules of the invention can be present in association with one or more non-toxic pharmaceutically acceptable carriers and/or diluents and/or adjuvants, and if desired other active ingredients. The pharmaceutical compositions containing nucleic acid molecules of the invention can be in a form suitable for oral use, for example, as tablets, troches, lozenges, aqueous or oily suspensions, dispersible powders or granules, emulsion, hard or soft capsules, or syrups or elixirs.

[0762] Compositions intended for oral use can be prepared according to any method known to the art for the manufacture of pharmaceutical compositions and such compositions can contain one or more such sweetening agents, flavoring agents, coloring agents or preservative agents in order to provide pharmaceutically elegant and palatable preparations. Tablets contain the active ingredient in admixture with non-toxic pharmaceutically acceptable excipients that are suitable for the manufacture of tablets. These excipients can be, for example, inert diluents; such as calcium carbonate, sodium carbonate, lactose, calcium phosphate or sodium phosphate; granulating and disintegrating agents, for example, corn starch, or alginic acid; binding agents, for example starch, gelatin or acacia; and lubricating agents, for example magnesium stearate, stearic acid or talc. The tablets can be uncoated or they can be coated by known techniques. In some cases such coatings can be prepared by known techniques to delay disintegration and absorption in the gastrointestinal tract and thereby provide a sustained action over a longer period. For example, a time delay material such as glyceryl monosterate or glyceryl distearate can be employed.

[0763] Formulations for oral use can also be presented as hard gelatin capsules wherein the active ingredient is mixed with an inert solid diluent, for example, calcium carbonate, calcium phosphate or kaolin, or as soft gelatin capsules wherein the active ingredient is mixed with water or an oil medium, for example peanut oil, liquid paraffin or olive oil.

[0764] Aqueous suspensions contain the active materials in a mixture with excipients suitable for the manufacture of aqueous suspensions. Such excipients are suspending agents, for example sodium carboxymethylcellulose, methylcellulose, hydropropyl-methylcellulose, sodium alginate, polyvinylpyrrolidone, gum tragacanth and gum acacia; dispersing or wetting agents can be a naturally-occurring phosphatide, for example, lecithin, or condensation products of an alkylene oxide with fatty acids, for example polyoxyethylene stearate, or condensation products of ethylene oxide with long chain aliphatic alcohols, for example heptadecaethyleneoxycetanol, or condensation products of ethylene oxide with partial esters derived from fatty acids and a hexitol such as polyoxyethylene sorbitol monooleate, or condensation products of ethylene oxide with partial esters derived from fatty acids and hexitol anhydrides, for example polyethylene sorbitan monooleate. The aqueous suspensions can also contain one or more preservatives, for example ethyl, or n-propyl p-hydroxybenzoate, one or more coloring agents, one or more flavoring agents, and one or more sweetening agents, such as sucrose or saccharin.

[0765] Oily suspensions can be formulated by suspending the active ingredients in a vegetable oil, for example arachis oil, olive oil, sesame oil or coconut oil, or in a mineral oil such as liquid paraffin. The oily suspensions can contain a thickening agent, for example beeswax, hard paraffin or cetyl alcohol. Sweetening agents and flavoring agents can be added to provide palatable oral preparations. These compositions can be preserved by the addition of an anti-oxidant such as ascorbic acid

[0766] Dispersible powders and granules suitable for preparation of an aqueous suspension by the addition of water provide the active ingredient in admixture with a dispersing or wetting agent, suspending agent and one or more preservatives. Suitable dispersing or wetting agents or suspending agents are exemplified by those already mentioned above. Additional excipients, for example sweetening, flavoring and coloring agents, can also be present.

[0767] Pharmaceutical compositions of the invention can also be in the form of oil-in-water emulsions. The oily phase can be a vegetable oil or a mineral oil or mixtures of these. Suitable emulsifying agents can be naturally-occurring gums, for example gum acacia or gum tragacanth, naturally-occurring phosphatides, for example soy bean, lecithin, and esters or partial esters derived from fatty acids and hexitol, anhydrides, for example sorbitan monooleate, and condensation products of the said partial esters with ethylene oxide, for example polyoxyethylene sorbitan monooleate. The emulsions can also contain sweetening and flavoring agents.

[0768] Syrups and elixirs can be formulated with sweetening agents, for example glycerol, propylene glycol, sorbitol, glucose or sucrose. Such formulations can also contain a demulcent, a preservative and flavoring and coloring agents. The pharmaceutical compositions can be in the form of a sterile injectable aqueous or oleaginous suspension. This suspension can be formulated according to the known art using those suitable dispersing or wetting agents and suspending agents that have been mentioned above. The sterile injectable preparation can also be a sterile injectable solution or suspension in a non-toxic parentally acceptable diluent or solvent, for example as a solution in 1,3-butanediol. Among the acceptable vehicles and solvents that can be employed are water, Ringer's solution and isotonic sodium chloride solution. In addition, sterile, fixed oils are conventionally employed as a solvent or suspending medium. For this purpose, any bland fixed oil can be employed including synthetic mono-or diglycerides. In addition, fatty acids such as oleic acid find use in the preparation of injectables.

[0769] The nucleic acid molecules of the invention can also be administered in the form of suppositories, e.g., for rectal administration of the drug. These compositions can be prepared by mixing the drug with a suitable non-irritating excipient that is solid at ordinary temperatures but liquid at the rectal temperature and will therefore melt in the rectum to release the drug. Such materials include cocoa butter and polyethylene glycols.

[0770] Nucleic acid molecules of the invention can be administered parenterally in a sterile medium. The drug, depending on the vehicle and concentration used, can either be suspended or dissolved in the vehicle. Advantageously, adjuvants such as local anesthetics, preservatives and buffering agents can be dissolved in the vehicle.

[0771] Dosage levels of the order of from about 0.1 mg to about 140 mg per kilogram of body weight per day are useful in the treatment of the above-indicated conditions (about 0.5 mg to about 7 g per subject per day). The amount of active ingredient that can be combined with the carrier materials to produce a single dosage form varies depending upon the host treated and the particular mode of administration. Dosage unit forms generally contain between from about 1 mg to about 500 mg of an active ingredient.

[0772] It is understood that the specific dose level for any particular subject depends upon a variety of factors including the activity of the specific compound employed, the age, body weight, general health, sex, diet, time of administration, route of administration, and rate of excretion, drug combination and the severity of the particular disease undergoing therapy.

[0773] For administration to non-human animals, the composition can also be added to the animal feed or drinking water. It can be convenient to formulate the animal feed and drinking water compositions so that the animal takes in a therapeutically appropriate quantity of the composition along with its diet. It can also be convenient to present the composition as a premix for addition to the feed or drinking water.

[0774] The nucleic acid molecules of the present invention can also be administered to a subject in combination with other therapeutic compounds to increase the overall therapeutic effect. The use of multiple compounds to treat an indication can increase the beneficial effects while reducing the presence of side effects.

[0775] In one embodiment, the invention comprises compositions suitable for administering nucleic acid molecules of the invention to specific cell types. For example, the asialoglycoprotein receptor (ASGPr) (Wu and Wu, 1987, J. Biol. Chem. 262, 4429-4432) is unique to hepatocytes and binds branched galactose-terminal glycoproteins, such as asialoorosomucoid (ASOR). In another example, the folate receptor is overexpressed in many cancer cells. Binding of such glycoproteins, synthetic glycoconjugates, or folates to the receptor takes place with an affinity that strongly depends on the degree of branching of the oligosaccharide chain, for example, triatennary structures are bound with greater affinity than biatenarry or monoatennary chains (Baenziger and Fiete, 1980, Cell, 22, 611-620; Connolly et al., 1982, J. Biol. Chem., 257, 939-945). Lee and Lee, 1987, Glycoconjugate J., 4, 317-328, obtained this high specificity through the use of N-acetyl-D-galactosamine as the carbohydrate moiety, which has higher affinity for the receptor, compared to galactose. This “clustering effect” has also been described for the binding and uptake of mannosyl-terminating glycoproteins or glycoconjugates (Ponpipom et al., 1981, J. Med. Chem., 24, 1388-1395). The use of galactose, galactosamine, or folate based conjugates to transport exogenous compounds across cell membranes can provide a targeted delivery approach to, for example, the treatment of liver disease, cancers of the liver, or other cancers. The use of bioconjugates can also provide a reduction in the required dose of therapeutic compounds required for treatment. Furthermore, therapeutic bioavialability, pharmacodynamics, and pharmacokinetic parameters can be modulated through the use of nucleic acid bioconjugates of the invention. Non-limiting examples of such bioconjugates are described in Vargeese et al., U.S. Ser. No. 10/201,394, filed Aug. 13, 2001; and Matulic-Adamic et al., U.S. Ser. No. 10/151,116, filed May 17, 2002. In one embodiment, nucleic acid molecules of the invention are complexed with or covalently attached to nanoparticles, such as Hepatitis B virus S, M, or L evelope proteins (see for example Yamado et al., 2003, Nature Biotechnology, 21, 885). In one embodiment, nucleic acid molecules of the invention are delivered with specificity for human tumor cells, specifically non-apoptotic human tumor cells including for example T-cells, hepatocytes, breast carcinoma cells, ovarian carcinoma cells, melanoma cells, intestinal epithelial cells, prostate cells, testicular cells, non-small cell lung cancers, small cell lung cancers, etc.

[0776] In one embodiment, a siNA molecule of the invention is designed or formulated to specifically target endothelial cells or tumor cells. For example, various formulations and conjugates can be utilized to specifically target endothelial cells or tumor cells, including PEI-PEG-folate, PEI-PEG-RGD, PEI-PEG-biotin, PEI-PEG-cholesterol, and other conjugates known in the art that enable specific targeting to endothelial cells and/or tumor cells.

### Examples

[0777] The following are non-limiting examples showing the selection, isolation, synthesis and activity of nucleic acids of the instant invention.

### Example 1

### Tandem Synthesis of siNA Constructs

[0778] Exemplary siNA molecules of the invention are synthesized in tandem using a cleavable linker, for example, a succinyl-based linker. Tandem synthesis as described herein is followed by a one-step purification process that provides RNAi molecules in high yield. This approach is highly amenable to siNA synthesis in support of high throughput RNAi screening, and can be readily adapted to multi-column or multi-well synthesis platforms.

[0779] After completing a tandem synthesis of a siNA oligo and its complement in which the 5′-terminal dimethoxytrityl (5′-O-DMT) group remains intact (trityl on synthesis), the oligonucleotides are deprotected as described above. Following deprotection, the siNA sequence strands are allowed to spontaneously hybridize. This hybridization yields a duplex in which one strand has retained the 5′-O-DMT group while the complementary strand comprises a terminal 5′-hydroxyl. The newly formed duplex behaves as a single molecule during routine solid-phase extraction purification (Trityl-On purification) even though only one molecule has a dimethoxytrityl group. Because the strands form a stable duplex, this dimethoxytrityl group (or an equivalent group, such as other trityl groups or other hydrophobic moieties) is all that is required to purify the pair of oligos, for example, by using a C18 cartridge.

[0780] Standard phosphoramidite synthesis chemistry is used up to the point of introducing a tandem linker, such as an inverted deoxy abasic succinate or glyceryl succinate linker (see FIG. 1) or an equivalent cleavable linker. A non-limiting example of linker coupling conditions that can be used includes a hindered base such as diisopropylethylamine (DIPA) and/or DMAP in the presence of an activator reagent such as Bromotripyrrolidinophosphoniumhexaflurorophosphate (PyBrOP). After the linker is coupled, standard synthesis chemistry is utilized to complete synthesis of the second sequence leaving the terminal the 5′-O-DMT intact. Following synthesis, the resulting oligonucleotide is deprotected according to the procedures described herein and quenched with a suitable buffer, for example with 50 mM NaOAc or 1.5M NH₄H₂CO₃.

[0781] Purification of the siNA duplex can be readily accomplished using solid phase extraction, for example using a Waters C18 SepPak 1 g cartridge conditioned with 1 column volume (CV) of acetonitrile, 2 CV H₂O, and 2 CV 50 mM NaOAc. The sample is loaded and then washed with 1 CV H₂O or 50 mM NaOAc. Failure sequences are eluted with 1 CV 14% ACN (Aqueous with 50 mM NaOAc and 50 mM NaCl). The column is then washed, for example with 1 CV H₂O followed by on-column detritylation, for example by passing 1 CV of 1% aqueous trifluoroacetic acid (TFA) over the column, then adding a second CV of 1% aqueous TFA to the column and allowing to stand for approximately 10 minutes. The remaining TFA solution is removed and the column washed with H₂O followed by 1 CV 1M NaCl and additional H₂O. The siNA duplex product is then eluted, for example, using 1 CV 20% aqueous CAN.

[0782] FIG. 2 provides an example of MALDI-TOF mass spectrometry analysis of a purified siNA construct in which each peak corresponds to the calculated mass of an individual siNA strand of the siNA duplex. The same purified siNA provides three peaks when analyzed by capillary gel electrophoresis (CGE), one peak presumably corresponding to the duplex siNA, and two peaks presumably corresponding to the separate siNA sequence strands. Ion exchange HPLC analysis of the same siNA contract only shows a single peak. Testing of the purified siNA construct using a luciferase reporter assay described below demonstrated the same RNAi activity compared to siNA constructs generated from separately synthesized oligonucleotide sequence strands.

### Example 2

### Serum Stability of Chemically Modified siNA Constructs

[0783] Chemical modifications were introduced into siNA constructs to determine the stability of these constructs compared to native siNA oligonucleotides (containing two thymidine nucleotide overhangs) in human serum. An investigation of the serum stability of RNA duplexes revealed that siNA constructs consisting of all RNA nucleotides containing two thymidine nucleotide overhangs have a half-life in serum of 15 seconds, whereas chemically modified siNA constructs remained stable in serum for 1 to 3 days depending on the extent of modification (see FIG. 3). RNAi stability tests were performed by internally labeling one strand (strand 1) of siNA and duplexing with 1.5× the concentration of the complementary siNA strand (strand 2) (to insure all labeled material was in duplex form). Duplexed siNA constructs were then tested for stability by incubating at a final concentration of 2 μM siNA (strand 2 concentration) in 90% mouse or human serum for time-points of 30sec, 1 min, 5 min, 30 min, 90 min, 4 hrs 10 min, 16 hrs 24 min, and 49 hrs. Time points were run on a 15% denaturing polyacrylamide gels and analyzed on a phosphoimager.

[0784] Internal labeling was performed via kinase reactions with polynucleotide kinase (PNK) and ³²P -γ-ATP, with addition of radiolabeled phosphate at nucleotide 13 of strand 2, counting in from the 3′ side. Ligation of the remaining 8-mer fragments with T4 RNA ligase resulted in the full length, 21-mer, strand 2. Duplexing of RNAi was done by adding appropriate concentrations of the siNA oligonucleotides and heating to 95° C. for 5 minutes followed by slow cooling to room temperature. Reactions were performed by adding 100% serum to the siNA duplexes and incubating at 37° C., then removing aliquots at desired time-points. Results of this study are summarized in FIG. 3. As shown in the FIG. 3, chemically modified siNA molecules have significantly increased serum stability compared to a siNA construct having all ribonucleotides except a 3′-terminal dithymidine (TT) modification.

### Example 3

### Identification of Potential siNA Target Sites in Any RNA Sequence

[0785] The sequence of an RNA target of interest, such as a viral or human mRNA transcript, is screened for target sites, for example by using a computer folding algorithm. In a non-limiting example, the sequence of a gene or RNA gene transcript derived from a database, such as Genbank, is used to generate siNA targets having complementarity to the target. Such sequences can be obtained from a database, or can be determined experimentally as known in the art. Target sites that are known, for example, those target sites determined to be effective target sites based on studies with other nucleic acid molecules, for example ribozymes or antisense, or those targets known to be associated with a disease, condition, trait, genotype or phenotype such as those sites containing mutations or deletions, can be used to design siNA molecules targeting those sites. Various parameters can be used to determine which sites are the most suitable target sites within the target RNA sequence. These parameters include but are not limited to secondary or tertiary RNA structure, the nucleotide base composition of the target sequence, the degree of homology between various regions of the target sequence, or the relative position of the target sequence within the RNA transcript. Based on these determinations, any number of target sites within the RNA transcript can be chosen to screen siNA molecules for efficacy, for example by using in vitro RNA cleavage assays, cell culture, or animal models. In a non-limiting example, anywhere from 1 to 1000 target sites are chosen within the transcript based on the size of the siNA construct to be used. High throughput screening assays can be developed for screening siNA molecules using methods known in the art, such as with multi-well or multi-plate assays or combinatorial/siNA library screening assays to determine efficient reduction in target gene expression.

### Example 4

### Selection of siNA Molecule Target Sites in a RNA

[0786] The following non-limiting steps can be used to carry out the selection of siNAs targeting a given gene sequence or transcript.

[0787] The target sequence is parsed in silico into a list of all fragments or subsequences of a particular length, for example 23 nucleotide fragments, contained within the target sequence. This step is typically carried out using a custom Perl script, but commercial sequence analysis programs such as Oligo, MacVector, or the GCG Wisconsin Package can be employed as well.

[0788] In some instances the siNAs correspond to more than one target sequence; such would be the case for example in targeting different transcripts of the same gene, targeting different transcripts of more than one gene, or for targeting both the human gene and an animal homolog. In this case, a subsequence list of a particular length is generated for each of the targets, and then the lists are compared to find matching sequences in each list. The subsequences are then ranked according to the number of target sequences that contain the given subsequence; the goal is to find subsequences that are present in most or all of the target sequences. Alternately, the ranking can identify subsequences that are unique to a target sequence, such as a mutant target sequence. Such an approach would enable the use of siNA to target specifically the mutant sequence and not effect the expression of the normal sequence.

[0789] In some instances the siNA subsequences are absent in one or more sequences while present in the desired target sequence; such would be the case if the siNA targets a gene with a paralogous family member that is to remain untargeted. As in case 2 above, a subsequence list of a particular length is generated for each of the targets, and then the lists are compared to find sequences that are present in the target gene but are absent in the untargeted paralog.

[0790] The ranked siNA subsequences can be further analyzed and ranked according to GC content. A preference can be given to sites containing 30-70% GC, with a further preference to sites containing 40-60% GC.

[0791] The ranked siNA subsequences can be further analyzed and ranked according to self-folding and internal hairpins. Weaker internal folds are preferred; strong hairpin structures are to be avoided.

[0792] The ranked siNA subsequences can be further analyzed and ranked according to whether they have runs of GGG or CCC in the sequence. GGG (or even more Gs) in either strand can make oligonucleotide synthesis problematic and can potentially interfere with RNAi activity, so it is avoided other appropriately suitable sequences are available. CCC is searched in the target strand because that will place GGG in the antisense strand.

[0793] The ranked siNA subsequences can be further analyzed and ranked according to whether they have the dinucleotide UU (uridine dinucleotide) on the 3′-end of the sequence, and/or AA on the 5′-end of the sequence (to yield 3′ UU on the antisense sequence). These sequences allow one to design siNA molecules with terminal TT thymidine dinucleotides.

[0794] Four or five target sites are chosen from the ranked list of subsequences as described above. For example, in subsequences having 23 nucleotides, the right 21 nucleotides of each chosen 23-mer subsequence are then designed and synthesized for the upper (sense) strand of the siNA duplex, while the reverse complement of the left 21 nucleotides of each chosen 23-mer subsequence are then designed and synthesized for the lower (antisense) strand of the siNA duplex (see Tables I). If terminal TT residues are desired for the sequence (as described in paragraph 7), then the two 3′ terminal nucleotides of both the sense and antisense strands are replaced by TT prior to synthesizing the oligos.

[0795] The siNA molecules are screened in an in vitro, cell culture or animal model system to identify the most active siNA molecule or the most preferred target site within the target RNA sequence.

[0796] In an alternate approach, a pool of siNA constructs specific to a target sequence is used to screen for target sites in cells expressing target RNA, such as human HeLa cells. The general strategy used in this approach is shown in FIG. 21. A non-limiting example of such a pool is a pool comprising sequences having antisense sequences complementary to the target RNA sequence and sense sequences complementary to the antisense sequences. Cells (e.g., HeLa cells) expressing the target gene are transfected with the pool of siNA constructs and cells that demonstrate a phenotype associated with gene silencing are sorted. The pool of siNA constructs can be chemically modified as described herein and synthesized, for example, in a high throughput manner. The siNA from cells demonstrating a positive phenotypic change (e.g., decreased target mRNA levels or target protein expression), are identified, for example by positional analysis within the assay, and are used to determine the most suitable target site(s) within the target RNA sequence based upon the complementary sequence to the corresponding siNA antisense strand identified in the assay.

### Example 5

### RNAi Activity of Chemically Modified siNA Constructs

[0797] Short interfering nucleic acid (siNA) is emerging as a powerful tool for gene regulation. All-ribose siNA duplexes activate the RNAi pathway but have limited utility as therapeutic compounds due to their nuclease sensitivity and short half-life in serum, as shown in Example 2 above. To develop nuclease-resistant siNA constructs for in vivo applications, siNAs that target luciferase mRNA and contain stabilizing chemical modifications were tested for activity in HeLa cells. The sequences for the siNA oligonucleotide sequences used in this study are shown in Table I. Modifications included phosphorothioate linkages (P=S), 2′-O-methyl nucleotides, or 2′-fluoro (F) nucleotides in one or both siNA strands and various 3′-end stabilization chemistries, including 3′-glyceryl, 3′-inverted abasic, 3′-inverted Thymidine, and/or Thymidine. The RNAi activity of chemically stabilized siNA constructs was compared with the RNAi activity of control siNA constructs consisting of all ribonucleotides at every position except the 3′-terminus which comprised two thymidine nucleotide overhangs. Active siNA molecules containing stabilizing modifications such as described herein should prove useful for in vivo applications, given their enhanced nuclease-resistance.

[0798] A luciferase reporter system was utilized to test RNAi activity of chemically modified siNA constructs compared to siNA constructs consisting of all RNA nucleotides containing two thymidine nucleotide overhangs. Sense and antisense siNA strands (20 uM each) were annealed by incubation in buffer (100 mM potassium acetate, 30 mM HEPES-KOH, pH 7.4, 2 mM magnesium acetate) for 1 min. at 90° C. followed by 1 hour at 37° C. Plasmids encoding firefly luciferase (pGL2) and renilla luciferase (pRLSV40) were purchased from Promega Biotech.

[0799] HeLa S3 cells were grown at 37° C. in DMEM with 5% FBS and seeded at 15,300 cells in 100 ul media per well of a 96-well plate 24 hours prior to transfection. For transfection, 4 ul Lipofectamine 2000 (Life Technologies) was added to 96 ul OPTI-MEM, vortexed and incubated at room temperature for 5 minutes. The 100 ul diluted lipid was then added to a microtiter tube containing 5 ul pGL2 (200 ng/ul), 5 ul pRLSV40 (8 ng/ul) 6 ul siNA (25 nM or 10 nM final), and 84 ul OPTI-MEM, vortexed briefly and incubated at room temperature for 20 minutes. The transfection mix was then mixed briefly and 50 ul was added to each of three wells that contained HeLa S3 cells in 100 ul media. Cells were incubated for 20 hours after transfection and analyzed for luciferase expression using the Dual luciferase assay according to the manufacturer's instructions (Promega Biotech). The results of this study are summarized in FIGS. 4-16. The sequences of the siNA strands used in this study are shown in Table I and are referred to by Sirna/RPI # in the figures. Normalized luciferase activity is reported as the ratio of firefly luciferase activity to renilla luciferase activity in the same sample. Error bars represent standard deviation of triplicate transfections. As shown in FIGS. 4-16, the RNAi activity of chemically modified constructs is often comparable to that of unmodified control siNA constructs, which consist of all ribonucleotides at every position except the 3′-terminus which comprises two thymidine nucleotide overhangs. In some instances, the RNAi activity of the chemically modified constructs is greater than the unmodified control siNA construct consisting of all ribonucleotides.

[0800] For example, FIG. 4 shows results Obtained from a screen using phosphorothioate modified siNA constructs. The Sirna/RPI 27654/27659 construct contains phosphorothioate substitutions for every pyrimidine nucleotide in both sequences, the Sirna/RPI 27657127662 construct contains 5 terminal 3′-phosphorothioate substitutions in each strand, the Sirna/RPI 27649/27658 construct contains all phosphorothioate substitutions only in the antisense strand, whereas the Sims/RPI 27649/27660 and Sirna/RPI 27649/27661 constructs have unmodified sense strands and varying degrees of phosphorothioate substitutions in the antisense strand. All of these constructs show significant RNAi activity when compared to a scrambled siNA conrol construct (27651/27652).

[0801] FIG. 5 shows results obtained from a screen using phosphorothioate (Sirna/RPI 28253/28255 and Sirna/RPI 28254/28256) and universal base substitutions (Sirna/RPI 28257/28259 and Sirna/RPI 28258/28260) compared to the same controls described above, these modifications show equivalent or better RNAi activity when compared to the unmodified control siNA construct.

[0802] FIG. 6 shows results obtained from a screen using 2′-O-methyl modified siNA constructs in which the sense strand contains either 10 (Sirna/RPI 28244/27650) or 5 (Sirna/RPI 28245/27650) 2′-O-methyl substitutions, both with comparable activity to the unmodified control siNA construct.

[0803] FIG. 7 shows results obtained from a screen using 2′-O-methyl or 2′-deoxy-2′-fluoro modified siNA constructs compared to a control construct consisting of all ribonucleotides at every position except the 3′-terminus which comprises two thymidine nucleotide overhangs.

[0804] FIG. 8 compares a siNA construct containing six phosphorothioate substitutions in each strand (Sirna/RPI 28460/28461), where 5 phosphorothioates are present at the 3′ end and a single phosphorothioate is present at the 5′ end of each strand. This motif shows very similar activity to the control siNA construct consisting of all ribonucleotides at every position except the 3′-terminus, which comprises two thymidine nucleotide overhangs.

[0805] FIG. 9 compares a siNA construct synthesized by the method of the invention described in Example 1, wherein an inverted deoxyabasic succinate linker was used to generate a siNA having a 3′-inverted deoxyabasic cap on the antisense strand of the siNA. This construct shows improved activity compared to the control siNA construct consisting of all ribonucleotides at every position except the 3′-terminus which comprises two thymidine nucleotide overhangs.

[0806] FIG. 10 shows the results of an RNAi activity screen of chemically modifed siNA constructs including 3′-glyceryl modified siNA constructs compared to an all RNA control siNA construct using a luciferase reporter system. These chemically modified siNAs were compared in the luciferase assay described herein at 1 nM and 10 nM concentration using an all RNA siNA control (siGL2) having 3′-terminal dithymidine (TT) and its corresponding inverted control (Inv siGL2). The background level of luciferase expression in the HeLa cells is designated by the “cells” column. Sense and antisense strands of chemically modified siNA constructs are shown by Sirna/RPI number (sense strand/antisense strand). Sequences corresponding to these Sirna/RPI numbers are shown in Table I. As shown in the Figure, the 3′-terminal modified siNA constructs retain significant RNAi activity compared to the unmodified control siNA (siGL2) construct.

[0807] FIG. 11 shows the results of an RNAi activity screen of chemically modifed siNA constructs. The screen compared various combinations of sense strand chemical modifications and antisense strand chemical modifications. These chemically modified siNAs were compared in the luciferase assay described herein at 1 nM and 10 nM concentration using an all RNA siNA control (siGL2) having 3′-terminal dithymidine (TT) and its corresponding inverted control (Inv siGL2). The background level of luciferase expression in the HeLa cells is designated by the “cells” column. Sense and antisense strands of chemically modified siNA constructs are shown by Sirna/RPI number (sense strand/antisense strand). Sequences corresponding to these Sirna/RPI numbers are shown in Table I. As shown in the figure, the chemically modified Sirna/RPI 30063/30430, Sirna/RPI 30433/30430, and Sirna/RPI 30063/30224 constructs retain significant RNAi activity compared to the unmodified control siNA construct. It should be noted that Sirna/RPI 30433/30430 is a siNA construct having no ribonucleotides which retains significant RNAi activity compared to the unmodified control siGL2 construct in vitro, therefore, this construct is expected to have both similar RNAi activity and improved stability in vivo compared to siNA constructs having ribonucleotides.

[0808] FIG. 12 shows the results of an RNAi activity screen of chemically modifed siNA constructs. The screen compared various combinations of sense strand chemical modifications and antisense strand chemical modifications. These chemically modified siNAs were compared in the luciferase assay described herein at 1 nM and 10 nM concentration using an all RNA siNA control (siGL2) having 3′-terminal dithymidine (TT) and its corresponding inverted control (Inv siGL2). The background level of luciferase expression in the HeLa cells is designated by the “cells” column. Sense and antisense strands of chemically modified siNA constructs are shown by Sirna/RPI number (sense strand/antisense strand). Sequences corresponding to these Sirna/RPI numbers are shown in Table I. As shown in the figure, the chemically modified Sirna/RPI 30063/30224 and Sirna/RPI 30063/30430 constructs retain significant RNAi activity compared to the control siNA (siGL2) construct. In addition, the antisense strand alone (Sirna/RPI 30430) and an inverted control (Sirna/RPI 30227/30229), having matched chemistry to Sirna/RPI (30063/30224) were compared to the siNA duplexes described above. The antisense strand (Sirna/RPI 30430) alone provides far less inhibition compared to the siNA duplexes using this sequence.

[0809] FIG. 13 shows the results of an RNAi activity screen of chemically modifed siNA constructs. The screen compared various combinations of sense strand chemical modifications and antisense strand chemical modifications. These chemically modified siNAs were compared in the luciferase assay described herein at 1 nM and 10 nM concentration using an all RNA siNA control (siGL2) having 3′-terminal dithymidine (TT) and its corresponding inverted control (Inv siGL2). The background level of luciferase expression in the HeLa cells is designated by the “cells” column. Sense and antisense strands of chemically modified siNA constructs are shown by Sirna/RPI number (sense strand/antisense strand). Sequences corresponding to these Sirna/RPI numbers are shown in Table I. In addition, an inverted control (Sirna/RPI 30226/30229, having matched chemistry to Sirna/RPI 30222/30224) was compared to the siNA duplexes described above. As shown in the figure, the chemically modified Sirna/RPI 28251/30430, Sirna/RPI 28251/30224, and Sirna/RPI 30222/30224 constructs retain significant RNAi activity compared to the control siNA construct, and the chemically modified Sirna/RPI 28251/30430 construct demonstrates improved activity compared to the control siNA (siGL2) construct.

[0810] FIG. 14 shows the results of an RNAi activity screen of chemically modifed siNA constructs including various 3′-terminal modified siNA constructs compared to an all RNA control siNA construct using a luciferase reporter system. These chemically modified siNAs were compared in the luciferase assay described herein at 1 nM and 10 nM concentration using an all RNA siNA control (siGL2) having 3′-terminal dithymidine (TT) and its corresponding inverted control (Inv siGL2). The background level of luciferase expression in the HeLa cells is designated by the “cells” column. Sense and antisense strands of chemically modified siNA constructs are shown by Sirna/RPI number (sense strand/antisense strand). Sequences corresponding to these Sirna/RPI ₙumbers are shown in Table I. As shown in the figure, the chemically modified Sirna/RPI 30222/30546, 30222/30224, 30222/30551, 30222/30557 and 30222/30558 constructs retain significant RNAi activity compared to the control siNA construct.

[0811] FIG. 15 shows the results of an RNAi activity screen of chemically modifed siNA constructs. The screen compared various combinations of sense strand chemistries compared to a fixed antisense strand chemistry. These chemically modified siNAs were compared in the luciferase assay described herein at 1 nM and 10 nM concentration using an all RNA siNA control (siGL2) having 3′-terminal dithymidine (TT) and its corresponding inverted control (Inv siGL2). The background level of luciferase expression in the HeLa cells is designated by the “cells” column. Sense and antisense strands of chemically modified siNA constructs are shown by Sirna/RPI number (sense strand/antisense strand). Sequences corresponding to these Sirna/RPI numbers are shown in Table I. As shown in the figure, the chemically modified Sirna/RPI 30063/30430, 30434/30430, and 30435/30430 constructs all demonstrate greater activity compared to the control siNA (siGL2) construct.

### Example 6

### RNAi Activity Titration

[0812] A titration assay was performed to determine the lower range of siNA concentration required for RNAi activity both in a control siNA construct consisting of all RNA nucleotides containing two thymidine nucleotide overhangs and a chemically modified siNA construct comprising five phosphorothioate internucleotide linkages in both the sense and antisense strands. The assay was performed as described above, however, the siNA constructs were diluted to final concentrations between 2.5 nM and 0.025 nM. Results are shown in FIG. 16. As shown in FIG. 16, the chemically modified siNA construct shows a very similar concentration dependent RNAi activity profile to the control siNA construct when compared to an inverted siNA sequence control.

### Example 7

### siNA Design

[0813] siNA target sites were chosen by analyzing sequences of the target RNA and optionally prioritizing the target sites on the basis of folding (structure of any given sequence analyzed to determine siNA accessibility to the target), by using a library of siNA molecules as described in Example 4, or alternately by using an in vitro siNA system as described in Example 9 herein. siNA molecules were designed that could bind each target and are optionally individually analyzed by computer folding to assess whether the siNA molecule can interact with the target sequence. Varying the length of the siNA molecules can be chosen to optimize activity. Generally, a sufficient number of complementary nucleotide bases are chosen to bind to, or otherwise interact with, the target RNA, but the degree of complementarity can be modulated to accommodate siNA duplexes or varying length or base composition. By using such methodologies, siNA molecules can be designed to target sites within any known RNA sequence, for example those RNA sequences corresponding to the any gene transcript.

[0814] Chemically modified siNA constructs are designed to provide nuclease stability for systemic administration in vivo and/or improved pharmacokinetic, localization, and delivery properties while preserving the ability to mediate RNAi activity. Chemical modifications as described herein are introduced synthetically using synthetic methods described herein and those generally known in the art. The synthetic siNA constructs are then assayed for nuclease stability in serum and/or cellular/tissue extracts (e.g., liver extracts). The synthetic siNA constructs are also tested in parallel for RNAi activity using an appropriate assay, such as a luciferase reporter assay as described herein or another suitable assay that can quantity RNAi activity. Synthetic siNA constructs that possess both nuclease stability and RNAi activity can be further modified and re-evaluated in stability and activity assays. The chemical modifications of the stabilized active siNA constructs can then be applied to any siNA sequence targeting any chosen RNA and used, for example, in target screening assays to pick lead siNA compounds for therapeutic development (see for example FIG. 27).

### Example 8

### Chemical Synthesis and Purification of siNA

[0815] siNA molecules can be designed to interact with various sites in the RNA message, for example, target sequences within the RNA sequences described herein. The sequence of one strand of the siNA molecule(s) is complementary to the target site sequences described above. The siNA molecules can be chemically synthesized using methods described herein. Inactive siNA molecules that are used as control sequences can be synthesized by scrambling the sequence of the siNA molecules such that it is not complementary to the target sequence. Generally, siNA constructs can by synthesized using solid phase oligonucleotide synthesis methods as described herein (see for example Usman et al., U.S. Pat. Nos. 5,804,683; 5,831,071; 5,998,203; 6,117,657; 6,353,098; 6,362,323; 6,437,117; 6,469,158; Scaringe et al., U.S. Pat. Nos. 6,111,086; 6,008,400; 6,111,086 all incorporated by reference herein in their entirety).

[0816] In a non-limiting example, RNA oligonucleotides are synthesized in a stepwise fashion using the phosphoramidite chemistry as is known in the art. Standard phosphoramidite chemistry involves the use of nucleosides comprising any of 5′-O-dimethoxytrityl, 2′-O-tert-butyldimethylsilyl, 3′-O-2-Cyanoethyl N,N-diisopropylphos-phoroamidite groups, and exocyclic amine protecting groups (e.g., N6-benzoyl adenosine, N4 acetyl cytidine, and N2-isobutyryl guanosine). Alternately, 2′-O-Silyl Ethers can be used in conjunction with acid-labile 2′-O-orthoester protecting groups in the synthesis of RNA as described by Scaringe supra. Differing 2′ chemistries can require different protecting groups, for example 2′-deoxy-2′-amino nucleosides can utilize N-phthaloyl protection as described by Usman et al., U.S. Pat. No. 5,631,360, incorporated by reference herein in its entirety).

[0817] During solid phase synthesis, each nucleotide is added sequentially (3′- to 5′-direction) to the solid support-bound oligonucleotide. The first nucleoside at the 3′-end of the chain is covalently attached to a solid support (e.g., controlled pore glass or polystyrene) using various linkers. The nucleotide precursor, a ribonucleoside phosphoramidite, and activator are combined resulting in the coupling of the second nucleoside phosphoramidite onto the 5′-end of the first nucleoside. The support is then washed and any unreacted 5′-hydroxyl groups are capped with a capping reagent such as acetic anhydride to yield inactive 5′-acetyl moieties. The trivalent phosphorus linkage is then oxidized to a more stable phosphate linkage. At the end of the nucleotide addition cycle, the 5′-O-protecting group is cleaved under suitable conditions (e.g., acidic conditions for trityl-based groups and Fluoride for silyl-based groups). The cycle is repeated for each subsequent nucleotide.

[0818] Modification of synthesis conditions can be used to optimize coupling efficiency, for example by using differing coupling times, differing reagent/phosphoramidite concentrations, differing contact times, differing solid supports and solid support linker chemistries depending on the particular chemical composition of the siNA to be . synthesized. Deprotection and purification of the siNA can be performed as is generally described in Deprotection and purification of the siNA can be performed as is generally described in Usman et al., U.S. Pat. No. 5,831,071, U.S. Pat. No. 6,353,098, U.S. Pat. No. 6,437,117, and Bellon et al., U.S. Pat. No. 6,054,576, U.S. Pat. No. 6,162,909, U.S. Pat. No. 6,303,773, or Scaringe supra, incorporated by reference herein in their entireties. Additionally, deprotection conditions can be modified to provide the best possible yield and purity of siNA constructs. For example, applicant has observed that oligonucleotides comprising 2′-deoxy-2′-fluoro nucleotides can degrade under inappropriate deprotection conditions. Such oligonucleotides are deprotected using aqueous methylamine at about 35° C. for 30 minutes. If the 2′-deoxy-2′-fluoro containing oligonucleotide also comprises ribonucleotides, after deprotection with aqueous methylamine at about 35° C. for 30 minutes, TEA-HF is added and the reaction maintained at about 65° C. for an additional 15 minutes.

### Example 9

### RNAi in vitro Assay to Assess siNA Activity

[0819] An in vitro assay that recapitulates RNAi in a cell free system is used to evaluate siNA constructs specific to target RNA. The assay comprises the system described by Tuschl et al., 1999, Genes and Development, 13, 3191-3197 and Zamore et al., 2000, Cell, 101, 25-33 adapted for use with target RNA. A Drosophila extract derived from syncytial blastoderm is used to reconstitute RNAi activity in vitro. Target RNA is generated via in vitro transcription from an appropriate plasmid using T7 RNA polymerase or via chemical synthesis as described herein. Sense and antisense siNA strands (for example 20 uM each) are annealed by incubation in buffer (such as 100 mM potassium acetate, 30 mM HEPES-KOH, pH 7.4, 2 mM magnesium acetate) for 1 minute at 90° C. followed by 1 hour at 37° C., then diluted in lysis buffer (for example 100 mM potassium acetate, 30 mM HEPES-KOH at pH 7.4, 2mM magnesium acetate). Annealing can be monitored by gel electrophoresis on an agarose gel in TBE buffer and stained with ethidium bromide. The Drosophila lysate is prepared using zero to two-hour-old embryos from Oregon R flies collected on yeasted molasses agar that are dechorionated and lysed. The lysate is centrifuged and the supernatant isolated. The assay comprises a reaction mixture containing 50% lysate [vol/vol], RNA (10-50 pM final concentration), and 10% [vol/vol] lysis buffer containing siNA (10 nM final concentration). The reaction mixture also contains 10 mM creatine phosphate, 10 ug.ml creatine phosphokinase, 100 um GTP, 100 uM UTP, 100 uM CTP, 500 uM ATP, 5 mM DTT, 0.1 U/uL RNasin (Promega), and 100 uM of each amino acid. The final concentration of potassium acetate is adjusted to 100 mM. The reactions are pre-assembled on ice and preincubated at 25° C. for 10 minutes before adding RNA, then incubated at 25° C. for an additional 60 minutes. Reactions are quenched with 4 volumes of 1.25× Passive Lysis Buffer (Promega). Target RNA cleavage is assayed by RT-PCR analysis or other methods known in the art and are compared to control reactions in which siNA is omitted from the reaction.

[0820] Alternately, internally-labeled target RNA for the assay is prepared by in vitro transcription in the presence of [alpha-³²P] CTP, passed over a G 50 Sephadex column by spin chromatography and used as target RNA without further purification. Optionally, target RNA is 5′-³²P-end labeled using T4 polynucleotide kinase enzyme. Assays are performed as described above and target RNA and the specific RNA cleavage products generated by RNAi are visualized on an autoradiograph of a gel. The percentage of cleavage is determined by Phosphor Imager® quantitation of bands representing intact control RNA or RNA from control reactions without siNA and the cleavage products generated by the assay.

[0821] In one embodiment, this assay is used to determine target sites the RNA target for siNA mediated RNAi cleavage, wherein a plurality of siNA constructs are screened for RNAi mediated cleavage of the RNA target, for example, by analyzing the assay reaction by electrophoresis of labeled target RNA, or by northern blotting, as well as by other methodology well known in the art.

### Example 10

### Nucleic Acid Inhibition of Target RNA in vivo

[0822] siNA molecules targeted to the target RNA are designed and synthesized as described above. These nucleic acid molecules can be tested for cleavage activity in vivo, for example, using the following procedure.

[0823] Two formats are used to test the efficacy of siNAs targeting a particular gene transcipt. First, the reagents are tested on target expressing cells (e.g., HeLa), to determine the extent of RNA and protein inhibition. siNA reagents are selected against the RNA target. RNA inhibition is measured after delivery of these reagents by a suitable transfection agent to cells. Relative amounts of target RNA are measured versus actin using real-time PCR monitoring of amplification (eg., ABI 7700 Taqman( ). A comparison is made to a mixture of oligonucleotide sequences made to unrelated targets or to a randomized siNA control with the same overall length and chemistry, but with randomly substituted nucleotides at each position. Primary and secondary lead reagents are chosen for the target and optimization performed. After an optimal transfection agent concentration is chosen, a RNA time-course of inhibition is performed with the lead siNA molecule. In addition, a cell-plating format can be used to determine RNA inhibition.

Delivery of siNA to Cells

[0824] Cells (e.g., HeLa) are seeded, for example, at 1×105 cells per well of a six-well dish in EGM-2 (BioWhittaker) the day before transfection. siNA (final concentration, for example 20 nM) and cationic lipid (e.g., final concentration 2 □g/ml) are complexed in EGM basal media (Biowhittaker) at 37° C. for 30 mins in polystyrene tubes. Following vortexing, the complexed siNA is added to each well and incubated for the times indicated. For initial optimization experiments, cells are seeded, for example, at 1×103 in 96 well plates and siNA complex added as described. Efficiency of delivery of siNA to cells is determined using a fluorescent siNA complexed with lipid. Cells in 6-well dishes are incubated with siNA for 24 hours, rinsed with PBS and fixed in 2% paraformaldehyde for 15 minutes at room temperature. Uptake of siNA is visualized using a fluorescent microscope.

Taqman and Lightcycler Quantification of mRNA

[0825] Total RNA is prepared from cells following siNA delivery, for example, using Qiagen RNA purification kits for 6-well or Rneasy extraction kits for 96-well assays. For Taqman analysis, dual-labeled probes are synthesized with the reporter dye, FAM or JOE, covalently linked at the 5′-end and the quencher dye TAMRA conjugated to the 3′-end. One-step RT-PCR amplifications are performed on, for example, an ABI PRISM 7700 Sequence Detector using 50 μl reactions consisting of 10 μl total RNA, 100 nM forward primer, 900 nM reverse primer, 100 nM probe, 1× TaqMan PCR reaction buffer (PE-Applied Biosystems), 5.5 mM MgCl2, 300 μM each dATP, dCTP, dGTP, and dTTP, 10U RNase Inhibitor (Promega), 1.25U AmpliTaq Gold (PE-Applied Biosystems) and 10U M-MLV Reverse Transcriptase (Promega). The thermal cycling conditions can consist of 30 min at 48° C., 10 min at 95° C., followed by 40 cycles of 15 sec at 95° C. and 1 min at 60° C. Quantitation of mRNA levels is determined relative to standards generated from serially diluted total cellular RNA (300, 100, 33, 11 ng/rxn) and normalizing to β-actin or GAPDH mRNA in parallel TaqMan reactions. For each gene of interest an upper and lower primer and a fluorescently labeled probe are designed. Real time incorporation of SYBR Green I dye into a specific PCR product can be measured in glass capillary tubes using a lightcyler. A standard curve is generated for each primer pair using control cRNA. Values are represented as relative expression to GAPDH in each sample.

### Western Blotting

[0826] Nuclear extracts can be prepared using a standard micro preparation technique (see for example Andrews and Faller, 1991, Nucleic Acids Research, 19, 2499). Protein extracts from supernatants are prepared, for example using TCA precipitation. An equal volume of 20% TCA is added to the cell supernatant, incubated on ice for 1 hour and pelleted by centrifugation for 5 minutes. Pellets are washed in acetone, dried and resuspended in water. Cellular protein extracts are run on a 10% Bis-Tris NuPage (nuclear extracts) or 4-12% Tris-Glycine (supernatant extracts) polyacrylamide gel and transferred onto nitro-cellulose membranes. Non-specific binding can be blocked by incubation, for example, with 5% non-fat milk for 1 hour followed by primary antibody for 16 hour at 4° C. Following washes, the secondary antibody is applied, for example (1:10,000 dilution) for 1 hour at room temperature and the signal detected with SuperSignal reagent (Pierce).

### Example 11

### Animal Models

[0827] Various animal models can be used to screen siNA constructs in vivo as are known in the art, for example those animal models that are used to evaluate other nucleic acid technologies such as enzymatic nucleic acid molecules (ribozymes) and/or antisense. Such animal models are used to test the efficacy of siNA molecules described herein. In a non-limiting example, siNA molecules that are designed as anti-angiogenic agents can be screened using animal models. There are several animal models available in which to test the anti-angiogenesis effect of nucleic acids of the present invention, such as siNA, directed against genes associated with angiogenesis and/or metastais, such as VEGFR (e.g., VEGFR1, VEGFR2, and VEGFR3) genes. Typically a corneal model has been used to study angiogenesis in rat and rabbit, since recruitment of vessels can easily be followed in this normally avascular tissue (Pandey et al., 1995 Science 268: 567-569). In these models, a small Teflon or Hydron disk pretreated with an angiogenesis factor (e.g., bFGF or VEGF) is inserted into a pocket surgically created in the cornea. Angiogenesis is monitored 3 to 5 days later. siNA molecules directed against VEGFR mRNAs would be delivered in the disk as well, or dropwise to the eye over the time course of the experiment. In another eye model, hypoxia has been shown to cause both increased expression of VEGF and neovascularization in the retina (Pierce et al., 1995 Proc. Natl. Acad. Sci. USA. 92: 905-909; Shweiki et al., 1992 J. Clin. Invest. 91: 2235-2243).

[0828] Several animal models exist for screening of anti-angiogenic agents. These include corneal vessel formation following corneal injury (Burger et al., 1985 Cornea 4: 35-41; Lepri, et al., 1994 J. Ocular Pharmacol. 10: 273-280; Ormerod et al., 1990 Am. J. Pathol. 137: 1243-1252) or intracorneal growth factor implant (Grant et al., 1993 Diabetologia 36: 282-291; Pandey et al. 1995 supra; Zieche et al., 1992 Lab. Invest. 67: 711-715), vessel growth into Matrigel matrix containing growth factors (Passaniti et al., 1992 supra), female reproductive organ neovascularization following hormonal manipulation (Shweiki et al., 1993 Clin. Invest. 91: 2235-2243), several models involving inhibition of tumor growth in highly vascularized solid tumors (O'Reilly et al., 1994 Cell 79: 315-328; Senger et al., 1993 Cancer and Metas. Rev. 12: 303-324; Takahasi et al., 1994 Cancer Res. 54: 4233-4237; Kim et al., 1993 supra), and transient hypoxia-induced neovascularization in the mouse retina (Pierce et al., 1995 Proc. Natl. Acad. Sci. USA. 92: 905-909).gene

[0829] The cornea model, described in Pandey et al. supra, is the most common and well characterized anti-angiogenic agent efficacy screening model. This model involves an avascular tissue into which vessels are recruited by a stimulating agent (growth factor, thermal or alkalai burn, endotoxin). The corneal model utilizes the intrastromal corneal implantation of a Teflon pellet soaked in a VEGF-Hydron solution to recruit blood vessels toward the pellet, which can be quantitated using standard microscopic and image analysis techniques. To evaluate their anti-angiogenic efficacy, siNA molecules are applied topically to the eye or bound within Hydron on the Teflon pellet itself. This avascular cornea as well as the Matrigel model (described below) provide for low background assays. While the corneal model has been performed extensively in the rabbit, studies in the rat have also been conducted.

[0830] The mouse model (Passaniti et al., supra) is a non-tissue model which utilizes Matrigel, an extract of basement membrane (Kleinman et al., 1986) or Millipore® filter disk, which can be impregnated with growth factors and anti-angiogenic agents in a liquid form prior to injection. Upon subcutaneous administration at body temperature, the Matrigel or Millipore® filter disk forms a solid implant. VEGF embedded in the Matrigel or Millipore® filter disk is used to recruit vessels within the matrix of the Matrigel or Millipore® filter disk which can be processed histologically for endothelial cell specific vWF (factor VIII antigen) immunohistochemistry, Trichrome-Masson stain, or hemoglobin content. Like the cornea, the Matrigel or Millipore® filter disk are avascular; however, it is not tissue. In the Matrigel or Millipore® filter disk model, siNA molecules are administered within the matrix of the Matrigel or Millipore® filter disk to test their anti-angiogenic efficacy. Thus, delivery issues in this model, as with delivery of siNA molecules by Hydron-coated Teflon pellets in the rat cornea model, may be less problematic due to the homogeneous presence of the siNA within the respective matrix.

[0831] The Lewis lung carcinoma and B-16 murine melanoma models are well accepted models of primary and metastatic cancer and are used for initial screening of anti-cancer agents. These murine models are not dependent upon the use of immunodeficient mice, are relatively inexpensive, and minimize housing concerns. Both the Lewis lung and B-16 melanoma models involve subcutaneous implantation of approximately 10⁶ tumor cells from metastatically aggressive tumor cell lines (Lewis lung lines 3LL or D122, LLc-LN7; B-16-BL6 melanoma) in C57BL/6J mice. Alternatively, the Lewis lung model can be produced by the surgical implantation of tumor spheres (approximately 0.8 mm in diameter). Metastasis also may be modeled by injecting the tumor cells directly intravenously. In the Lewis lung model, microscopic metastases can be observed approximately 14 days following implantation with quantifiable macroscopic metastatic tumors developing within 21-25 days. The B-16 melanoma exhibits a similar time course with tumor neovascularization beginning 4 days following implantation. Since both primary and metastatic tumors exist in these models after 21-25 days in the same animal, multiple measurements can be taken as indices of efficacy. Primary tumor volume and growth latency as well as the number of micro- and macroscopic metastatic lung foci or number of animals exhibiting metastases can be quantitated. The percent increase in lifespan can also be measured. Thus, these models would provide suitable primary efficacy assays for screening systemically administered siNA molecules and siNA formulations.

[0832] In the Lewis lung and B-16 melanoma models, systemic pharmacotherapy with a wide variety of agents usually begins 1-7 days following tumor implantation/inoculation with either continuous or multiple administration regimens. Concurrent pharmacokinetic studies can be performed to determine whether sufficient tissue levels of siNA can be achieved for pharmacodynamic effect to be expected. Furthermore, primary tumors and secondary lung metastases can be removed and subjected to a variety of in vitro studies (i.e. target RNA reduction).

[0833] Ohno-Matsui et al., 2002, Am. J. Pathology, 160, 711-719 describe a model of severe proliferative retinopathy and retinal detachment in mice under inducible expression of vascular endothelial growth factor. In this model, expression of a VEGF transgene results in elevated levels of ocular VEGF that is associated with severe proliferative retinopathy and retinal detachment. Furthermore, Mori et al., 2001, J. Cellular Physiology, 188, 253-263, describe a model of laser induced choroidal neovascularization that can be used in conjunction with intravitreous or subretianl injection of siNA molecules of the invention to evaluate the efficacy of siNA treatment of severe proliferative retinopathy and retinal detachment.

[0834] In utilizing these models to assess siNA. activity, VEGFR1, VEGFR2, and/or VEGFR3 protein levels can be measured clinically or experimentally by FACS analysis. VEGFR1, VEGFR2, and/or VEGFR3 encoded mRNA levels can be assessed by Northern analysis, RNase-protection, primer extension analysis and/or quantitative RT-PCR. siNA molecules that block VEGFR1, VEGFR2, and/or VEGFR3 protein encoding mRNAs and therefore result in decreased levels of VEGFR1, VEGFR2, and/or VEGFR3 activity by more than 20% in vitro can be identified using the techniques described herein.

### Example 12

### siNA-Mediated Inhibition of Angiogenesis in vivo

[0835] The purpose of this study was to assess the anti-angiogenic activity of siNA targeted against VEGFR1, using the rat cornea model of VEGF induced angiogenesis discussed in Example 11 above). The siNA molecules shown in FIG. 23 have matched inverted controls which are inactive since they are not able to interact with the RNA target. The siNA molecules and VEGF were co-delivered using the filter disk method. Nitrocellulose filter disks (Millipore®) of 0.057 diameter were immersed in appropriate solutions and were surgically implanted in rat cornea as described by Pandey et al., supra.

[0836] The stimulus for angiogenesis in this study was the treatment of the filter disk with 30 μM VEGF which is implanted within the cornea's stroma. This dose yields reproducible neovascularization stemming from the pericorneal vascular plexus growing toward the disk in a dose-response study 5 days following implant. Filter disks treated only with the vehicle for VEGF show no angiogenic response. The siNA were co-adminstered with VEGF on a disk in three different siNA concentrations. One concern with the simultaneous administration is that the siNA would not be able to inhibit angiogenesis since VEGF receptors can be stimulated. However, Applicant has observed that in low VEGF doses, the neovascular response reverts to normal suggesting that the VEGF stimulus is essential for maintaining the angiogenic response. Blocking the production of VEGF receptors using simultaneous administration of anti-VEGF-R mRNA siNA could attenuate the normal neovascularization induced by the filter disk treated with VEGF.

### Materials and Methods:

### Test Compounds and Controls

[0837] R&D Systems VEGF, carrier free at 75 μM in 82 mM Tris-Cl, pH 6.9
[0838] siNA, 1.67 μG/μL, SITE 2340 (SIRNA/RPI 29695/29699) sense/antisense
[0839] siNA, 1.67 μG/μL, INVERTED CONTROL FOR SITE 2340 (SIRNA/RPI 29983/29984) sense/antisense
[0840] siNA 1.67 μg/μL, Site 2340 (Sirna/RPI 30196/30416) sense/antisense

### Animals

[0841] Harlan Sprague-Dawley Rats, Approximately 225-250 g

[0842] 45 males, 5 animals per group.

### Husbandry

[0843] Animals are housed in groups of two. Feed, water, temperature and humidity are determined according to Pharmacology Testing Facility performance standards (SOP's) which are in accordance with the 1996 Guide for the Care and Use of Laboratory Animals (NRC). Animals are acclimated to the facility for at least 7 days prior to experimentation. During this time, animals are observed for overall health and sentinels are bled for baseline serology.

### Experimental Groups

[0844] Each solution (VEGF and siNAs) was prepared as a 1× solution for final concentrations shown in the experimental groups described in Table III.

siNA Annealing Conditions

[0845] siNA sense and antisense strands are annealed for 1 minute in H₂O at 1.67mg/mL/strand followed by a 1 hour incubation at 37° C. producing 3.34 mg/mL of duplexed siNA. For the 20 μg/eye treatment, 6 μLs of the 3.34 mg/mL duplex is injected into the eye (see below). The 3.34 mg/mL duplex siNA can then be serially diluted for dose response assays.

### Preparation of VEGF Filter Disk

[0846] For corneal implantation, 0.57 mm diameter nitrocellulose disks, prepared from 0.45 μm pore diameter nitrocellulose filter membranes (Millipore Corporation), were soaked for 30 min in 1 μL of 75 μM VEGF in 82 mM Tris HCl (pH 6.9) in covered petri dishes on ice. Filter disks soaked only with the vehicle for VEGF (83 mM Tris-Cl pH 6.9) elicit no angiogenic response.

### Corneal Surgery

[0847] The rat corneal model used in this study was a modified from Koch et al. Supra and

[0848] Pandey et al., supra. Briefly, corneas were irrigated with 0.5% povidone iodine solution followed by normal saline and two drops of 2% lidocaine. Under a dissecting microscope (Leica MZ-6), a stromal pocket was created and a presoaked filter disk (see above) was inserted into the pocket such that its edge was 1 mm from the corneal limbus.

### Intraconjunctival Injection of Test Solutions

[0849] Immediately after disk insertion, the tip of a 40-50 μm OD injector (constructed in our laboratory) was inserted within the conjunctival tissue 1 mm away from the edge of the corneal limbus that was directly adjacent to the VEGF-soaked filter disk. Six hundred nanoliters of test solution (siNA, inverted control or sterile water vehicle) were dispensed at a rate of 1.2 μL/min using a syringe pump (Kd Scientific). The injector was then removed, serially rinsed in 70% ethanol and sterile water and immersed in sterile water between each injection. Once the test solution was injected, closure of the eyelid was maintained using microaneurism clips until the animal began to recover gross motor activity. Following treatment, animals were warmed on a heating pad at 37° C.

### Quantitation of Angiogenic Response

[0850] Five days after disk implantation, animals were euthanized following administration of 0.4 mg/kg atropine and corneas were digitally imaged. The neovascular surface area (NSA, expressed in pixels) was measured postmortem from blood-filled corneal vessels using computerized morphometry (Image Pro Plus, Media Cybernetics, v2.0). The individual mean NSA was determined in triplicate from three regions of identical size in the area of maximal neovascularization between the filter disk and the limbus. The number of pixels corresponding to the blood-filled corneal vessels in these regions was summated to produce an index of NSA. A group mean NSA was then calculated. Data from each treatment group were normalized to VEGF/siNA vehicle-treated control NSA and finally expressed as percent inhibition of VEGF-induced angiogenesis.

### Statistics

[0851] After determining the normality of treatment group means, group mean percent inhibition of VEGF-induced angiogenesis was subjected to a one-way analysis of variance. This was followed by two post-hoc tests for significance including Dunnett's (comparison to VEGF control) and Tukey-Kramer (all other group mean comparisons) at alpha=0.05. Statistical analyses were performed using JMP v.3.1.6 (SAS Institute).

[0852] Results of the study are graphically represented in FIGS. 23 and 76. As shown in FIG. 23, VEGFr1 site 4229 active siNA (Sirna/RPI 29695/29699) at three concentrations were effective at inhibiting angiogenesis compared to the inverted siNA control (Sirna/RPI 29983/29984) and the VEGF control. A chemically modified version of the VEGFr1 site 4229 active siNA comprising a sense strand having 2′-deoxy-2′-fluoro pyrimidines and ribo purines with 5′ and 3′ terminal inverted deoxyabasic residues and an antisense strand having having 2′-deoxy-2′-fluoro pyrimidines and ribo purines with a terminal 3′-phosphorothioate intemucleotide linkage (Sirna/RPI 30196/30416), showed similar inhibition. Furthermore, VEGFr1 site 349 active siNA having “Stab 9/10” chemistry (Sirna #31270/31273) was tested for inhibition of VEGF-induced angiogenesis at three different concentrations (2.0 ug, 1.0 ug, and 0.1 μg dose response) as compared to a matched chemistry inverted control siNA construct (Sirna #31276/31279) at each concentration and a VEGF control in which no siNA was administered. As shown in FIG. 76, the active siNA construct having “Stab 9/10” chemistry (Sirna #31270/31273) is highly effective in inhibiting VEGF-induced angiogenesis in the rat corneal model compared to the matched chemistry inverted control siNA at concentrations from 0.1 μg to 2.0 ug. These results demonstrate that siNA molecules having different chemically modified compositions, such as the modifications described herein, are capable of significantly inhibiting angiogenesis in vivo.

### Example 13

### Inhibition of HBV Using siNA Molecules of the Invention

[0853] Transfection of HepG2 Cells with psHBV-1 and siNA

[0854] The human hepatocellular carcinoma cell line Hep G2 was grown in Dulbecco's modified Eagle media supplemented with 10% fetal calf serum, 2 mM glutamine, 0.1 mM nonessential amino acids, 1 mM sodium pyruvate, 25 mM Hepes, 100 units penicillin, and 100 μg/ml streptomycin. To generate a replication competent cDNA, prior to transfection the HBV genomic sequences are excised from the bacterial plasmid sequence contained in the psHBV-1 vector. Other methods known in the art can be used to generate a replication competent cDNA. This was done with an EcoRl and Hind III restriction digest. Following completion of the digest, a ligation was performed under dilute conditions (20 μg/ml) to favor intermolecular ligation. The total ligation mixture was then concentrated using Qiagen spin columns.

[0855] siNA Activity Screen and Dose Response Assay

[0856] Transfection of the human hepatocellular carcinoma cell line, Hep G2, with replication-competent HBV DNA results in the expression of HBV proteins and the production of virions. To test the efficacy of siNAs targeted against HBV RNA, several siNA duplexes targeting different sites within HBV pregenomic RNA were co-transfected with HBV genomic DNA once at 25 nM with lipid at 12.5 ug/ml into Hep G2 cells, and the subsequent levels of secreted HBV surface antigen (HBsAg) were analyzed by ELISA (see FIG. 24). Inverted sequence duplexes were used as negative controls. Subsequently, dose response studies were performed in which the siNA duplexes were co-transfected with HBV genomic DNA at 0.5, 5, 10 and 25 nM with lipid at 12.5 ug/ml into Hep G2 cells, and the subsequent levels of secreted HBV surface antigen (HBsAg) were analyzed by ELISA (see FIG. 25).

Analysis of HBsAg Levels Following siNA Treatment

[0857] To determine siNA activity, HbsAg levels were measured following transfection with siNA. Immulon 4 (Dynax) microtiter wells were coated overnight at 4( C with anti-HBsAg Mab (Biostride B88-95-31ad,ay) at 1 (g/ml in Carbonate Buffer (Na2CO3 15 mM, NaHCO3 35 mM, pH 9.5). The wells were then washed 4× with PBST (PBS, 0.05% Tween® 20) and blocked for 1 hr at 37( C with PEST, 1% BSA. Following washing as above, the wells were dried at 37( C for 30 min. Biotinylated goat ant-HBsAg (Accurate YVS1807) was diluted 1:1000 in PBST and incubated in the wells for 1 hr. at 37( C. The wells were washed 4x with PBST. Streptavidin/Alkaline Phosphatase Conjugate (Pierce 21324) was diluted to 250 ng/ml in PBST, and incubated in the wells for 1 hr. at 37( C.

[0858] After washing as above, p-nitrophenyl phosphate substrate (Pierce 37620) was added to the wells, which were then incubated for 1 hour at 37( C. The optical density at 405 nm was then determined. Results of the HBV screen study are summarized in FIG. 24, whereas the results of a dose response assay using lead siNA constructs targeting sites 262 and 1580 of the HBV pregenomic RNA are shown in FIG. 25. As shown in FIG. 25, the siNA constructs targeting sites 262 and 1580 of HBV RNA provides significant dose response inhibition of viral replication/activity when compared to inverted siNA controls.

Comparison of Different Chemically Stabilized siNA Motifs Targeting HBV RNA Site 1580

[0859] Two different siNA stabilization chemistries were compared in a dose response HBsAg assay using inverted matched chemistry controls. The “Stab7/8” (Table IV) constructs comprise a sense strand having 2′-deoxy-2′-fluoro pyrimidine nucleotides and 2′-deoxy purine nucleotides with 5′ and 3′ terminal inverted deoxyabasic residues and an antisense strand having 2′-deoxy-2′-fluoro pyrimidine nucleotides and 2′-O-methyl purine nucleotides with a terminal 3′ phosphorothioate linkage. The “Stab7/11 (Table IV) constructs comprise a sense strand having 2′-deoxy-2′-fluoro pyrimidine nucleotides and 2′-deoxy purine nucleotides with 5′ and 3′ terminal inverted deoxyabasic residues and an antisense strand having 2′-deoxy-2′-fluoro pyrimidine nucleotides and 2′-deoxy purine nucleotides with a terminal 3′ phosphorothioate linkage (see for example Table I). As shown in FIG. 26, the chemically stabilized siNA constructs both show significant inhibition of HBV antigen in a dose dependent manner compared to matched inverted controls. A separate direct screen of Stab 7/8 constructs targeting HBV RNAin HepG2 cells that identified stabilized siNA constructs with potent activity is shown in FIG. 87.

Time Course Evaluation of Different Chemically Stabilized siNA Motifs Targeting HBV RNA Site 1580

[0860] Four different siNA constructs having different stabilization chemistries were compared to an unstabilized siRNA construct in a dose response time course HBsAg assay, the results of which are shown in FIGS. 28-31. The different constructs were compared to an unstabilized ribonucleotide control siRNA construct (Sirna/RPI#30287/30298) at different concentrations (5 nM, 10 nM, 25 nM, 50 nM, and 100 nM) over the course of nine days. Activity based on HBsAg levels was determined at day 3, day 6, and day 9. The “Stab 4/5” (Table IV) constructs comprise a sense strand (Sirna/RPI#30355) having 2′-deoxy-2′-fluoro pyrimidine nucleotides and purine ribonucleotides with 5′ and 3′ terminal inverted deoxyabasic residues and an antisense strand (Sirna/RPI#30366) having 2′-deoxy-2′-fluoro pyrimidine nucleotides and purine ribonucleotides with a terminal 3′ phosphorothioate linkage (data shown in FIG. 28). The “Stab7/8” (Table IV) constructs comprise a sense strand (Sirna/RPI#30612) having 2′-deoxy-2′-fluoro pyrimidine nucleotides and 2′-deoxy purine nucleotides with 5′ and 3′ terminal inverted deoxyabasic residues and an antisense strand (Sirna/RPI#30620) having 2′-deoxy-2′-fluoro pyrimidine nucleotides and 2′-O-methyl purine nucleotides with a terminal 3′ phosphorothioate linkage (data shown in FIG. 29). The “Stab7/11 (Table IV) constructs comprise a sense (Sirna/RPI#30612) strand having 2′-deoxy-2′-fluoro pyrimidine nucleotides and 2′-deoxy purine nucleotides with 5′ and 3′ terminal inverted deoxyabasic residues and an antisense strand (Sirna/RPI#31175) having 2′-deoxy-2′-fluoro pyrimidine nucleotides and 2′-deoxy purine nucleotides with a terminal 3′ phosphorothioate linkage (data shown in FIG. 30). The “Stab9/10 (Table IV) constructs comprise a sense (Sirna/RPI#31335) strand having ribonucleotides with 5′ and 3′ terminal inverted deoxyabasic residues and an antisense strand (Sirna/RPI#31337) having ribonucleotides with a terminal 3′ phosphorothioate linkage (data shown in FIG. 31). As shown in FIGS. 28-31, the chemically stabilized siNA constructs all show significantly greater inhibition of HBV antigen in a dose dependent manner over the time course experiment compared to the unstabilized siRNA construct.

[0861] A second study was performed using the stab 4/5 (Sirna 30355/30366), stab 7/8 (Sirna 30612/30620), and stab 7/11 (Sirna 30612/31175) siNA constructs described above to examine the duration of effect of the modified siNA constructs out to 21 days post transfection compared to an all RNA control siNA (Sirna 30287/30298). A single transfection was performed with siRNAs targeted to HBV site 1580 and the culture media was subsequently replaced every three days. Secreted HBsAg levels were monitored for at 3, 6, 9, 12, 15, 18 and 21 days post-transfection. FIG. 77 shows activity of siNAs in reduction of HBsAg levels compared to matched inverted controls at A. 3 days, B. 9 days, and C. 21 days post transfection. Also shown is the corresponding percent inhibition as function of time at siNA concentrations of D. 100 nM, E. 50 nM, and F. 25 nM.

### Example 14

### Inhibition of HCV Using siNA Molecules of the Invention

[0862] siNA Inhibition of a Chimeric HCV/Poliovirus in HeLa Cells

[0863] Inhibition of a chimeric HCV/Poliovirus was investigated using 21 nucleotide siNA duplexes in HeLa cells. Seven siNA constructs were designed that target three regions in the highly conserved 5′ untranslated region (UTR) of HCV RNA. The siNAs were screened in two cell culture systems dependent upon the 5′-UTR of HCV; one requires translation of an HCV/luciferase gene, while the other involves replication of a chimeric HCV/poliovirus (PV) (see Blatt et al., U.S. Ser. No. 09/740,332, filed Dec. 18, 2000, incorporated by reference herein). Two siNAs (29579/29586; 29578/29585) targeting the same region (shifted by one nucleotide) are active in both systems (see FIG. 32) as compared with inverse control siNA (29593/29600). For example, a >85% reduction in HCVPV replication was observed in siNA-treated cells compared to an inverse siNA control (FIG. 32) with an IC50=˜2.5 nM (FIG. 33). To develop nuclease-resistant siNA for in vivo applications, siNAs can be modified to contain stabilizing chemical modifications. Such modifications include phosphorothioate linkages (P═S), 2′-O-methyl nucleotides, 2′-fluoro (F) nucleotides, 2′-deoxy nucleotides, universal base nucleotides, 5′ and/or 3′ end modifications and a variety of other nucleotide and non-nucleotide modifications, in one or both siNA strands. Several of these constructs were tested in the HCV/poliovirus chimera system, demonstrating significant reduction in viral replication (FIGS. 34-37). siNA constructs shown in FIGS. 34-37 are referred to by Sirna/RPI#s that are cross referenced to Table III, which shows the sequence and chemical modifications of the constructs. siNA activity is compared to relevant controls (untreated cells, scrambled/inactive control sequences, or transfection controls). As shown in the Figures, siNA constructs of the invention provide potent inhibition of HCV RNA in the HCV/poliovirus chimera system. As such, siNA constructs, inlcuding chemically modified, nuclease resistant siNA molecules, represent an important class of therapeutic agents for treating chronic HCV infection.

siNA Inhibition of a HCV RNA Expression in a HCV Replicon System

[0864] In addition, a HCV replicon system was used to test the efficacy of siNAs targeting HCV RNA. The reagents are tested in cell culture using Huh7 cells (see for example Randall et al., 2003, PNAS USA, 100, 235-240) to determine the extent of RNA and protein inhibition. siNA were selected against the HCV target as described herein. RNA inhibition was measured after delivery of these reagents by a suitable transfection agent to Huh7 cells. Relative amounts of target RNA are measured versus actin using real-time PCR monitoring of amplification (eg., ABI 7700 Taqman( ). A comparison is made to a mixture of oligonucleotide sequences, designed to target unrelated targets or to a randomized siNA control with the same overall length and chemistry, but with randomly substituted nucleotides at each position. Primary and secondary lead reagents were chosen for the target and optimization performed. After an optimal transfection agent concentration is chosen, a RNA time-course of inhibition is performed with the lead siNA molecule. In addition, a cell-plating format can be used to determine RNA inhibition. A non-limiting example of a multiple target screen to assay siNA mediated inhibition of HCV RNA is shown in FIG. 38. siNA reagents (Table I) were transfected at 25 nM into Huh7 cells and HCV RNA quantitated compared to untreated cells (“cells” column in the figure) and cells transfected with lipofectamine (“LFA2K” column in the figure). As shown in the Figure, several siNA constructs show significant inhibition of HCV RNA expression in the Huh7 replicon system. Chemically modified siNA constructs were then screened as described above, with a non-limiting example of a Stab 7/8 (see Table IV) chemisty siNA construct screen shown in FIG. 40. A follow up dose response study using chemically modified siNA constructs (Stab 4/5, see Table IV) at concentrations of 5 nM, 10 nM, 25 nM and 100 nM compared to matched chemistry inverted controls is shown in FIG. 39, whereas a dose response study for Stab 7/8 constructs at concentrations of 5 nM, 10 nM, 25 nM, 50 nM and 100 nM compared to matched chemistry inverted controls is shown in FIG. 41. A separate direct screen of Stab 7/8 constructs targeting HCV RNA that identified stabilized siNA constructs with potent activity is shown in FIG. 86.

### Example 15

### Target Discovery in Mammalian Cells Using siNA Molecules

[0865] In a non-limiting example, compositions and methods of the invention are used to discover genes involved in a process of interest within mammalian cells, such as cell growth, proliferation, apoptosis, morphology, angiogenesis, differentiation, migration, viral multiplication, drug resistance, signal transduction, cell cycle regulation, or temperature sensitivity or other process. First, a randomized siNA library is generated. These constructs are inserted into a vector capable of expressing a siNA from the library inside mammalian cells. Alternately, a pool of synthetic siNA molecules is generated.

### Reporter System

[0866] In order to discover genes playing a role in the expression of certain proteins, such as proteins involved in a cellular process described herein, a readily assayable reporter system is constructed in which a reporter molecule is co-expressed when a particular protein of interest is expressed. The reporter system consists of a plasmid construct bearing a gene coding for a reporter gene, such as Green Fluorescent Protein (GFP) or other reporter proteins known and readily available in the art. The promoter region of the GFP gene is replaced by a portion of a promoter for the protein of interest sufficient to direct efficient transcription of the GFP gene. The plasmid can also contain a drug resistance gene, such as neomycin resistance, in order to select cells containing the plasmid.

### Host Cell Lines for Target Discovery

[0867] A cell line is selected as host for target discovery. The cell line is preferably known to express the protein of interest, such that upstream genes controlling the expression of the protein can be identified when modulated by a siNA construct expressed therein. The cells preferably retain protein expression characteristics in culture. The reporter plasmid is transfected into cells, for example, using a cationic lipid formulation. Following transfection, the cells are subjected to limiting dilution cloning, for example, under selection by 600 μg/mL Geneticin. Cells retaining the plasmid survive the Geneticin treatment and form colonies derived from single surviving cells. The resulting clonal cell lines are screened by flow cytometry for the capacity to upregulate GFP production. Treating the cells with, for example, sterilized M9 bacterial medium in which Pseudomonas aeruginosa had been cultured (Pseudomonas conditioned medium, PCM) is used to induce the promoter. The PCM is supplemented with phorbol myristate acetate (PMA). A clonal cell line highly responsive to promoter induction is selected as the reporter line for subsequent studies.

siNA Library Construction

[0868] A siNA library was constructed with oligonucletides containing hairpin siNA constructs having randomized antisense regions and self complementary sense regions. The library is generated synthesizing siNA constructs having randomized sequence. Alternately, the siNA libraries are constructed as described in Usman et al., U.S. Ser. No. 60/402,996 (incorporated by reference herein) Oligo sequence 5′ and 3′ of the siNA contains restriction endonuclease cleavage sites for cloning. The 3′ trailing sequence forms a stem-loop for priming DNA polymerase extension to form a hairpin structure. The hairpin DNA construct is melted at 90° C. allowing DNA polymerase to generate a dsDNA construct. The double-stranded siNA library is cloned into, for example, a U6+27 transcription unit located in the 5′ LTR region of a retroviral vector containing the human nerve growth factor receptor (hNGFr) reporter gene. Positioning the U6+27/siNA transcription unit in the 5′ LTR results in a duplication of the transcription unit when the vector integrates into the host cell genome. As a result, the siNA is transcribed by RNA polymerase III from U6+27 and by RNA polymerase II activity directed by the 5′ LTR. The siNA library is packaged into retroviral particles that are used to infect and transduce clonal cells selected above. Assays of the hNGFr reporter are used to indicate the percentage of cells that incorporated the siNA construct. By randomized region is meant a region of completely random sequence and/or partially random sequence. By completely random sequence is meant a sequence wherein theoretically there is equal representation of A, T, G and C nucleotides or modified derivatives thereof, at each position in the sequence. By partially random sequence is meant a sequence wherein there is an unequal representation of A, T, G and C nucleotides or modified derivatives thereof, at each position in the sequence. A partially random sequence can therefore have one or more positions of complete randomness and one or more positions with defined nucleotides.

### Enriching for Non-Responders to Induction

[0869] Sorting of siNA library-containing cells is performed to enrich for cells that produce less reporter GFP after treatment with the promoter inducers PCM and PMA. Lower GFP production cancan be due to RNAi activity against genes involved in the activation of the mucin promoter. Alternatively, siNA can directly target the mucin/GFP transcript resulting in reduced GFP expression.

[0870] Cells are seeded at a certain density, such as 1×10⁶ per 150 cm² style cell culture flasks and grown in the appropriate cell culture medium with fetal bovine serum. After 72 hours, the cell culture medium is replaced with serum-free medium. After 24 hours of serum deprivation, the cells are treated with serum-containing medium supplemented with PCM (to 40%) and PMA (to 50 nM) to induced GFP production. After 20 to 22 hours, cells are monitored for GFP level on, for example, a FACStar Plus cell sorter. Sorting is performed if ≧90% of siNA library cells from an unsorted control sample were induced to produce GFP above background levels. Two cell fractions are collected in each round of sorting. Following the appropriate round of sorting, the M1 fraction is selected to generate a database of siNA molecules present in the sorted cells.

Recovery of siNA Sequence from Sorted Cells

[0871] Genomic DNA is obtained from sorted siNA library cells by standard methods. Nested polymerase chain reaction (PCR) primers that hybridized to the retroviral vector 5′ and 3′ of the siNA are used to recover and, amplify the siNA sequences from the particular clone of library cell DNA. The PCR product is ligated into a bacterial cloning vector. The recovered siNA library in plasmid form can be used to generate a database of siNA sequences. For example, the library is cloned into E. coli. DNA is prepared by plasmid isolation from bacterial colonies or by direct colony PCR and siNA sequence is determined. A second method can use the siNA library to transfect cloned cells. Clonal lines of stably transfected cells are established and induced with, for example, PCM and PMA. Those lines which fail to respond to GFP induction are probed by PCR for single siNA integration events. The unique siNA sequences obtained by both methods are added to a Target Sequence Tag (TST) database.

### Bioinformatics

[0872] The antisense region sequences of the isolated siNA constructs are compared to public and private gene data banks. Gene matches are compiled according to perfect and imperfect matches. Potential gene targets are categorized by the number of different siNA sequences matching each gene. Genes with more than one perfect siNA match are selected for Target Validation studies.

### Validation of the Target Gene

[0873] To validate a target as a regulator of protein expression, siNA reagents are designed to the target gene cDNA sequence from Genbank. The siNA reagents are complexed with a cationic lipid formulation prior to administration to cloned cells at appropriate concentrations (e.g., 5-50 nM or less). Cells are treated with siNA reagents, for example from 72 to 96 hours. Before the termination of siNA treatment, PCM (to 40%) and PMA (to 50 nM), for example, are added to induce the promoter. After twenty hours of induction the cells are harvested and assayed for phenotypic and molecular parameters. Reduced GFP expression in siNA treated cells (measured by flow cytometry) is taken as evidence for validation of the target gene. Knockdown of target RNA in siNA treated cells can correlate with reduced endogenous RNA and reduced GFP RNA to complete validation of the target.

### Example 16

### Screening siNA Constructs for Improved Pharmacokinetics

[0874] In a non-limiting example, siNA constructs are screened in vivo for improved pharmacokinetic properties compared to all RNA or unmodified siNA constructs. Chemical modifications are introduced into the siNA construct based on educated design parameters (e.g., introducing 2′-mofications, base modifications, backbone modifications, terminal cap modifications, or covalently attached conjugates etc). The modified construct in tested in an appropriate system (e.g human serum for nuclease resistance, shown, or an animal model for PK/delivery parameters). In parallel, the siNA construct is tested for RNAi activity, for example in a cell culture system such as a luciferase reporter assay). Lead siNA constructs are then identified which possess a particular characteristic while maintaining RNAi activity, and can be further modified and assayed once again. This same approach can be used to identify siNA-conjugate molecules with improved pharmacokinetic profiles, delivery, localized delivery, cellular uptake, and RNAi activity.

### Example 17

### Indications

[0875] The siNA molecules of the invention can be used to treat a variety of diseases and conditions through modulation of gene expression. Using the methods described herein, chemically modified siNA molecules can be designed to modulate the expression any number of target genes, including but not limited to genes associated with cancer, metabolic diseases, infectious diseases such as viral, bacterial or fungal infections, neurologic diseases, musculoskeletal diseases, diseases of the immune system, diseases associated with signaling pathways and cellular messengers, and diseases associated with transport systems including molecular pumps and channels.

[0876] Non-limiting examples of various viral genes that can be targeted using siNA molecules of the invention include Hepatitis C Virus (HCV, for example Genbank Accession Nos: D11168, D50483.1, L38318 and S82227), Hepatitis B Virus (HBV, for example GenBank Accession No. AF100308.1), Human Immunodeficiency Virus type 1 (HIV-1, for example GenBank Accession No. U51188), Human Immunodeficiency Virus type 2 (HIV-2, for example GenBank Accession No. X60667), West Nile Virus (WNV for example GenBank accession No. NC_{—}001563), cytomegalovirus (CMV for example GenBank Accession No. NC_{—}001347), respiratory syncytial virus (RSV for example GenBank Accession No. NC_{—}001781), influenza virus (for example example GenBank Accession No. AF037412, rhinovirus (for example, GenBank accession numbers: D00239, X02316, X01087, L24917, M16248, K02121, X01087), papillomavirus (for example GenBank Accession No. NC_{—}001353), Herpes Simplex Virus (HSV for example GenBank Accession No. NC_{—}001345), and other viruses such as HTLV (for example GenBank Accession No. AJ430458). Due to the high sequence variability of many viral genomes, selection of siNA molecules for broad therapeutic applications would likely involve the conserved regions of the viral genome. Nonlimiting examples of conserved regions of the viral genomes include but are not limited to 5′-Non Coding Regions (NCR), 3′-Non Coding Regions (NCR) LTR regions and/or internal ribosome entry sites (tRES). siNA molecules designed against conserved regions of various viral genomes will enable efficient inhibition of viral replication in diverse patient populations and may ensure the effectiveness of the siNA molecules against viral quasi species which evolve due to mutations in the non-conserved regions of the viral genome.

[0877] Non-limiting examples of human genes that can be targeted using siNA molecules of the invention using methods described herein include any human RNA sequence, for example those commonly referred to by Genbank Accession Number. These RNA sequences can be used to design siNA molecules that inhibit gene expression and therefore abrogate diseases, conditions, or infections associated with expression of those genes. Such non-limiting examples of human genes that can be targeted using siNA molecules of the invention include VEGF (for example GenBank Accession No. NM_{—}003376.3), VEGFr (VEGFR1 for example GenBank Accession No. XM_{—}067723, VEGFR2 for example GenBank Accession No. AF063658), HER1, HER2, HER3, and HER4 (for example Genbank Accession Nos: NM_{—}005228, NM_{—}004448, NM_{—}001982, and NM_{—}005235 respectively), telomerase (TERT, for example GenBank Accession No. NM_{—}003219), telomerase RNA (for example GenBank Accession No. U86046), NFkappaB, Rel-A (for example GenBank Accession No. NM_{—}005228), NOGO (for example GenBank Accession No. AB020693), NOGOr (for example GenBank Accession No. XM_{—}015620), RAS (for example GenBank Accession No. NM_{—}004283), RAF (for example GenBank Accession No. XM_{—}033884), CD20 (for example GenBank Accession No. X07203), METAP2 (for example GenBank Accession No. NM_{—}003219), CLCA1 (for example GenBank Accession No. NM_{—}001285), phospholamban (for example GenBank Accession No. NM_{—}002667), PTP1B (for example GenBank Accession No. M31724), PCNA (for example GenBank Accession No. NM_{—}002592.1), PKC-alpha (for example GenBank Accession No. NM_{—}002737) and others. The genes described herein are provided as non-limiting examples of genes that can be targeted using siNA molecules of the invention. Additional examples of such genes are described by accession number in Beigelman et al., U.S. Ser. No. 60/363,124, filed Mar. 11, 2002 and incorporated by reference herein in its entirety.

[0878] The siNA molecule of the invention can also be used in a variety of agricultural applications involving modulation of endogenous or exogenous gene expression in plants using siNA, including use as insecticidal, antiviral and anti-fungal agents or modulate plant traits such as oil and starch profiles and stress resistance.

### Example 18

### Diagnostic Uses

[0879] The siNA molecules of the invention can be used in a variety of diagnostic applications, such as in the identification of molecular targets (e.g., RNA) in a variety of applications, for example, in clinical, industrial, environmental, agricultural and/or research settings. Such diagnostic use of siNA molecules involves utilizing reconstituted RNAi systems, for example, using cellular lysates or partially purified cellular lysates. siNA molecules of this invention can be used as diagnostic tools to examine genetic drift and mutations within diseased cells or to detect the presence of endogenous or exogenous, for example viral, RNA in a cell. The close relationship between siNA activity and the structure of the target RNA allows the detection of mutations in any region of the molecule, which alters the base-pairing and three-dimensional structure of the target RNA. By using multiple siNA molecules described in this invention, one can map nucleotide changes, which are important to RNA structure and function in vitro, as well as in cells and tissues. Cleavage of target RNAs with siNA molecules can be used to inhibit gene expression and define the role of specified gene products in the progression of disease or infection. In this manner, other genetic targets can be defined as important mediators of the disease. These experiments will lead to better treatment of the disease progression by affording the possibility of combination therapies (e.g., multiple siNA molecules targeted to different genes, siNA molecules coupled with known email molecule inhibitors, or intermittent treatment with combinations siNA molecules and/or other chemical or biological molecules). Other in vitro uses of siNA molecules of this invention are well known in the art, and include detection of the presence of mRNAs associated with a disease, infection, or related condition. Such RNA is detected by determining the presence of a cleavage product after treatment with a siNA using standard methodologies, for example, fluorescence resonance emission transfer (FRET).

[0880] In a specific example, siNA molecules that cleave only wild-type or mutant forms of the target RNA are used for the assay. The first siNA molecules (i.e., those that cleave only wild-type forms of target RNA) are used to identify wild-type RNA present in the sample and the second siNA molecules (i.e., those that cleave only mutant forms of target RNA) are used to identify mutant RNA in the sample. As reaction controls, synthetic substrates of both wild-type and mutant RNA are cleaved by both siNA molecules to demonstrate the relative siNA efficiencies in the reactions and the absence of cleavage of the “non-targeted” RNA species. The cleavage products from the synthetic substrates also serve to generate size markers for the analysis of wild-type and mutant RNAs in the sample population. Thus, each analysis requires two siNA molecules, two substrates and one unknown sample, which is combined into six reactions. The presence of cleavage products is determined using an RNase protection assay so that full-length and cleavage fragments of each RNA can be analyzed in one lane of a polyacrylamide gel. It is not absolutely required to quantify the results to gain insight into the expression of mutant RNAs and putative risk of the desired phenotypic changes in target cells. The expression of mRNA whose protein product is implicated in the development of the phenotype (i.e., disease related or infection related) is adequate to establish risk. If probes of comparable specific activity are used for both transcripts, then a qualitative comparison of RNA levels is adequate and decreases the cost of the initial diagnosis. Higher mutant form to wild-type ratios are correlated with higher risk whether RNA levels are compared qualitatively or quantitatively.

### Example 19

### Synthesis of siNA Conjugates

[0881] The introduction of conjugate moieties to siNA molecules of the invention is accomplished either during solid phase synthesis using phosphoramidite chemistry described above, or post-synthetically using, for example, N-hydroxysuccinimide (NHS) ester coupling to an amino linker present in the siNA. Typically, a conjugate introduced during solid phase synthesis will be added to the 5′-end of a nucleic acid sequence as the final coupling reaction in the synthesis cycle using the phosphoramidite approach. Coupling conditions can be optimized for high yield coupling, for example by modification of coupling times and reagent concentrations to effectuate efficient coupling. As such, the 5′-end of the sense strand of a siNA molecule is readily conjugated with a conjugate moiety having a reactive phosphorus group available for coupling (e.g., a compound having Formulae 1, 5, 8, 55, 56, 57, 60, 86, 92, 104, 110, 113, 115, 116, 117, 118, 120, or 122) using the phosphoramidite approach, providing a 5′-terminal conjugate (see for example FIG. 65).

[0882] Conjugate precursors having a reactive phosphorus group and a protected hydroxyl group can be used to incorporate a conjugate moiety anywhere in the siNA sequence, such as in the loop portion of a single stranded hairpin siNA construct (see for example FIG. 66). For example, using the phosphoramidite approach, .a conjugate moiety comprising a phosphoramidite and protected hydroxyl (e.g., a compound having Formulae 86, 92, 104, 113, 115, 116, 117, 118, 120, or 122 herein) is first coupled at the desired position within the siNA sequence using solid phase synthesis phosphoramidite coupling. Second, removal of the protecting group (e.g., dimethoxytrityl) allows coupling of additional nucleotides to the siNA sequence. This approach allows the conjugate moiety to be positioned anywhere within the siNA molecule.

[0883] Conjugate derivatives can also be introduced to a siNA molecule post synthetically. Post synthetic conjugation allows a conjugate moiety to be introduced at any position within the siNA molecule where an appropriate functional group is present (e.g., a C5 alkylamine linker present on a nucleotide base or a 2′-alkylamine linker present on a nucleotide sugar can provide a point of attachment for an NHS-conjugate moiety). Generally, a reactive chemical group present in the siNA molecule is unmasked following synthesis, thus allowing post-synthetic coupling of the conjugate to occur. In a non-limiting example, an protected amino linker containing nucleotide (e.g., TFA protected C5 propylamino thymidine) is introduced at a desired position of the siNA during solid phase synthesis. Following cleavage and deprotection of the siNA, the free amine is made available for NHS ester coupling of the conjugate at the desired position within the siNA sequence, such as at the 3′-end of the sense and/or antisense strands, the 3′ and/or 5′-end of the sense strand, or within the siNA sequence, such as in the loop portion of a single stranded hairpin siNA sequence.

[0884] A conjugate moiety can be introduced at different locations within a siNA molecule using both solid phase synthesis and post-synthetic coupling approaches. For example, solid phase synthesis can be used to introduce a conjugate moiety at the 5′-end of the siNA (e.g., sense strand) and post-synthetic coupling can be used to introduce a conjugate moiety at the 3′-end of the siNA (e.g., sense strand and/or antisense strand). As such, a siNA sense strand having 3′ and 5′ end conjugates can be synthesized (see for example FIG. 65). Conjugate moieties can also be introduced in other combinations, such as at the 5′-end, 3′-end and/or loop portions of a siNA molecule (see for example FIG. 66).

### Example 20

### Phamacokinetics of siNA Conjugates (FIG. 67)

[0885] Three nuclease resistant siNA molecule targeting site 1580 of hepatitis B virus (HBV) RNA were designed using Stab 7/8 chemistry (see Table IV) and a 5′-terminal conjugate moiety.

[0886] One siNA conjugate comprises a branched cholesterol conjugate linked to the sense strand of the siNA. The “cholesterol” siNA conjugate molecule has the structure shown below:

[chemical structure]

[0887] where T stands for thymidine, B stands for inverted deoxyabasic, G stands for 2′-deoxy guanosine, A stands for 2′-deoxy adenosine, G stands for 2′-O-methyl guanosine, A stands for 2′-O-methyl adenosine, u stands for 2′-fluoro uridine, c stands for 2′-fluoro cytidine, a stands for adenosine, and s stands for phosphorothioate linkage.

[0888] Another siNA conjugate comprises a branched phospholipid conjugate linked to the sense strand of the siNA. The “phospholipid” siNA conjugate molecule has the structure shown below:

[chemical structure]

[0889] where T stands for thymidine, B stands for inverted deoxyabasic, G stands for 2′-deoxy guanosine, A stands for 2′-deoxy adenosine, G stands for 2′-O-methyl guanosine, A stands for 2′-O-methyl adenosine, u stands for 2′-fluoro uridine, c stands for 2′-fluoro cytidine, a stands for adenosine, and s stands for phosphorothioate linkage.

[0890] Another siNA conjugate comprises a polyethylene glycol (PEG) conjugate linked to the sense strand of the siNA. The “PEG” siNA conjugate molecule has the structure shown below:

[chemical structure]

[0891] where T stands for thymidine, B stands for inverted deoxyabasic, G stands for 2′-deoxy guanosine, A stands for 2′-deoxy adenosine, G stands for 2′-O-methyl guanosine, A stands for 2′-O-methyl adenosine, u stands for 2′-fluoro uridine, c stands for 2′-fluoro cytidine, a stands for adenosine, and s stands for phosphorothioate linkage.

[0892] The Cholesterol, Phospholipid, and PEG conjugates were evaluated for pharmakokinetic properties in mice compared to a non-conjugated siNA construct having matched chemistry and sequence. This study was conducted in female CD-1 mice approximately 26 g (6-7 weeks of age). Animals were housed in groups of 3. Food and water were provided ad libitum. Temperature and humidity were according to Pharmacology Testing Facility performance standards (SOP's) which are in accordance with the 1996 Guide for the Care and Use of Laboratory Animals (NRC). Animals were acclimated to the facility for at least 3 days prior to experimentation.

[0893] Absorbance at 260 nm was used to determine the actual concentration of the stock solution of pre-annealed HBV siNA. An appropriate amount of BBV siNA was diluted in sterile veterinary grade normal saline (0.9%) based on the average body weight of the mice. A small amount of the antisense (Stab 7) strand was internally labeled with gamma 32P-ATP. The 32P-labeled stock was combined with excess sense strand (Stab 8) and annealed. Annealing was confirmed prior to combination with unlabled drug. Each mouse received a subcutaneous bolus of 30 mg/kg (based on duplex) and approximately 10 million cpm (specific activity of approximately 15 cpm/ng).

[0894] Three animals per timepoint (1, 4, 8, 24, 72, 96 h) were euthanized by CO2 inhalation followed immediately by exsanguination. Blood was sampled from the heart and collected in heparinized tubes. After exsanguination, animals were perfused with 10-15 mL of sterile veterinary grade saline via the heart. Samples of liver were then collected and frozen.

[0895] Tissue samples were homogenized in a digestion buffer prior to compound quantitation. Quantitation of intact compound was determined by scintillation counting followed by PAGE and phosphorimage analysis. Results are shown in FIG. 43. As shown in the figure, the conjugated siNA constructs shown vastly improved liver PK compared to the unconjugated siNA construct.

### Example 21

### Cell Culture of siNA Conjugates (FIG. 68)

[0896] The Cholesterol conjugates and Phospholipid conjugated siNA constructs described in Example 20 above were evaluated for cell culture efficacy in a HBV cell culture system.

Transfection of HepG2 Cells with psHBV-1 and siNA

[0897] The human hepatocellular carcinoma cell line Hep G2 was grown in Dulbecco's modified Eagle media supplemented with 10% fetal calf serum, 2 mM glutamine, 0.1 mM nonessential amino acids, 1 mM sodium pyruvate, 25 mM Hepes, 100 units penicillin, and 100 μg/ml streptomycin. To generate a replication competent cDNA, prior to transfection the HBV genomic sequences are excised from the bacterial plasmid sequence contained in the psHBV-1 vector. Other methods known in the art can be used to generate a replication competent cDNA. This was done with an EcoRI and Hind III restriction digest. Following completion of the digest, a ligation was performed under dilute conditions (20 μg/ml) to favor intermolecular ligation. The total ligation mixture was then concentrated using Qiagen spin columns.

siNA Activity Screen and Dose Response Assay

[0898] Transfection of the human hepatocellular carcinoma cell line, Hep G2, with replication-competent HBV DNA results in the expression of HBV proteins and the production of virions. To test the efficacy of siNA conjugates targeted against HBV RNA, the Cholesterol siNA conjugate and Phospholipid siNA conjugate described in Example 12 were compared to a non-conjugated control siNA (see FIG. 68). An inverted sequence duplex was used as a negative control for the unconjugated siNA. Dose response studies were performed in which HBV genomic DNA was transfected with HBV genomic DNA with lipid at 12.5 ug/ml into Hep G2 cells. 24 hours after transfection with HBV DNA, cell culture media was removed and siNA duplexes were added to cells without lipid at 10 uM, 5, uM, 2.5 uM, 1 uM, and 100 nm and the subsequent levels of secreted HBV surface antigen (HBsAg) were analyzed by ELISA 72 hours post treatment (see FIG. 44). To determine siNA activity, HbsAg levels were measured following transfection with siNA. Immulon 4 (Dynax) microtiter wells were coated overnight at 4° C. with anti-HBsAg Mab (Biostride B88-95-31ad,ay) at 1 μg/ml in Carbonate Buffer (Na2CO3 15 mM, NaHCO3 35 mM, pH 9.5). The wells were then washed 4× with PBST (PBS, 0.05% Tween® 20) and blocked for 1 hr at 37° C. with PBST, 1% BSA. Following washing as above, the wells were dried at 37° C. for 30 min. Biotinylated goat ant-HBsAg (Accurate YVS 1807) was diluted 1:1000 in PBST and incubated in the wells for 1 hr. at 37° C. The wells were washed 4× with PBST. Streptavidin/Alkaline Phosphatase Conjugate (Pierce 21324) was diluted to 250 ng/ml in PBST, and incubated in the wells for 1 hr. at 37° C. After washing as above, p-nitrophenyl phosphate substrate (Pierce 37620) was added to the wells, which were then incubated for 1 hour at 37° C. The optical density at 405 nm was then determined. As shown in FIG. 68, the phospholipid and cholesterol conjugates demonstrate marked dose dependent inhibition of HBsAg expression compared to the unconjugated siNA construct when delivered to cells without any transfection agent (lipid).

### Example 22

### Ex vivo Stability of siNA Constructs

[0899] Chemically modified siNA constructs were designed and synthesized in order to improve resistance to nucleases while maintaining silencing in cell culture systems. Modified strands, designated Stab 4, Stab 5, Stab 7, Stab 8, and Stab 11 (Table IV), were tested in three sets of duplexes that demonstrated a range of stability and activity. These duplexes contained differentially modified sense and antisense strands. All modified sense strands contain terminal 5′ and 3′ inverted abasic caps, while antisense strands possess a 3′ terminal phosphorothioate linkage. The results characterize the impact of chemical modifications on nuclease resistance in ex vivo models of the environments sampled by drugs.

[0900] Active siNAs were assessed for their resistance to degradation in serum and liver extracts. Stability in blood will be a requirement for a systemically administered siNA, and an anti-HBV or anti-HCV siNA would require stability and activity in the hepatic intracellular environment. Liver extracts potentially provide an extreme nuclease model where many catabolic enzymes are present. Both mouse and human systems were assessed.

[0901] Individual strands of siNA duplexes were internally labeled with 32P and incubated as single strands or as duplex siRNAs in human or mouse serum and liver extracts. Representative data is shown in Table VI. Throughout the course of the experiments, constant levels of ribonuclease activity were verified. The extent and pattern of all-RNA siNA degradation (3 minute time point) did not change following preincubation of serum or liver extract at 37° C. for up to 24 hours.

[0902] The biological activity of siRNAs containing all-ribose residues has been well established. The extreme instability (t1/2=0.017 hours) of these compounds in serum underscores the need for chemical modification for use in systemic therapeutic applications. The Stab 4/5 duplex modifications provide significant stability in human and mouse serum (t1/2's=10-408 hours) and human liver extract (t1/2's=28-43 hours). In human serum the Stab 4 strand chemistry in the context of the Stab 4/5 duplex, possesses greater stability than the Stab 5 strand chemistry (t 1/2=408 vs. 39 hours). This result highlights the impact terminal modifications have on stability. A fully-modified Stab 7/11 construct (no ribonucleotides present) was generated from the Stab 4/5 constructs by substituting the ribonucleotides in all purine positions with deoxyribonucleotides. Another fully modified construct, Stab 7/8, was generated by replacing all purine positions in the antisense strand with 2′-O-methyl nucleotides. This proved to be the most stable antisense strand chemistry observed, with t1/2=816 hours in human liver extract.

[0903] The dramatic stability of Stab 8 modifications was also observed when non-duplexed single strands were incubated in human serum and liver extract, as shown in Table VII. An approximate five-fold increase in serum stability is seen for the double stranded constructs, compared to that observed for the individual strands. In liver extract, the siNA duplex provides even greater stability compared to the single strands. For example, the Stab 5 chemistry is greater than 100-fold more stable in the Stab 4/5 duplex relative to its stability alone.

[0904] Terminal modifications have a large impact on stability in human serum, as can be seen from a comparison of sense verses antisense stabilities in duplex form, and the Stab 4 and Stab 5 single-strand stabilities. Therefore, a number of 3′ antisense capping moieties on Stab 4/5 chemistry duplexes were assessed for their contribution to stability in human serum. The structures of these modifications are shown in FIG. 22, and resultant half-lives are shown in Table VIII. A wide range of different stabilities were observed, from half-lives as short as one hour to greater than 770 hours. Thus, in the context of 2′-fluoro modified pyrimidines, 3′-exonuclease becomes the primary mode of attack on duplexes in human serum; a number of chemistries minimize this site of attack. These results suggest that susceptibility to 3′ exonucleases is a major path to degradation in the serum.

### Example 23

### Activity of siNA Molecules Delivered Via Hydrodynamic Injection

[0905] An in vivo mouse model that utilizes hydrodynamic tail vein injection of a replication competent HBV vector has been used to assess the activity of chemically stabilized siRNA targeted to HBV RNA. The hydrodynamic delivery of nucleic acids in the mouse has been described by Liu et al., 1999, Gene Therapy, 6, 1258-1266, who showed that the vast majority of the nucleic acid is delivered to the liver by this technique. The use of the hydrodynamic technology to develop a HBV mouse model has been described by Yang et al., 2002, PNAS, 99, 13825-13830. In the vector-based model, HBV replicates in the liver for approximately 10 days, resulting in detectable levels of HBV RNA and antigens in the liver and HBV DNA and antigens in the serum.

[0906] To assess the activity of chemically stabilized siNAs against HBV, co-injection of the siNAs along with the HBV vector was done in mouse strain C57BL/J6. The HBV vector used, pWTD, is a head-to-tail dimer of the complete HBV genome (see for example Buckwold et al., 1996, J. Virology, 70, 5845-5851). For a 20 gram mouse, a total injection of 1.6 ml containing 10 μg or 1 μg of pWTD and 100 μg of siNA duplex in saline, was injected into the tail vein within 5 seconds. For a larger mouse, the volume is scaled to maintain a level of 140% of the blood volume of the mouse. The injection is done using a 3 cc syringe and 27 g1/2 needle. The animals were sacrificed at 72 hrs post-injection. Animals were treated with siNA constructs and matched chemistry inverted controls. Analysis of the HBV DNA (FIG. 80) and HBsAg (FIG. 81) levels in serum was conducted by real-time PCR and ELISA respectively. The levels of HBV RNA in the liver (FIG. 82) were analyzed by real-time RT-PCR. In a separate experiment, analysis of HBV DNA levels in serum was carried out at 5 days and 7 days (FIG. 83) after co-injection of siNA and the HBV vector.

[0907] This same model was used to evaluate the efficacy of siNA formulated with polyethyleneimine polyethylene glycol tri-N-acetyl-galactosamine (PEI-PEG-triGAL, FIG. 93). Active siNA (Compound #31335/31337) formulations were compared to inactive inverted control siNA (Compound #31336/31338) formulations. In order to allow recovery of the liver from the disruption caused by HDI, systemic dosing was started 96 hrs post-HDI. Each group received two days of dosing, and the animals were then sacrificed 24 hrs after the last dose. Animals were dosed with siNA formulated with PEI-PEG-triGal at siNA concentrations of 0.1, 0.3, and 1.0 mg/kg/day. Analysis of the HBV DNA (FIG. 91) and HBsAg (FIG. 92) levels in serum was conducted by real-time PCR and ELISA respectively. The levels of HBV RNA in the liver are analyzed by real-time RT-PCR. As shown in the figures, the active PEI-PEG-triGAL siNA formulation shows significant inhibition of HBV DNA and HBsAg levels in serum compared to the inactive formulation.

### Example 23

### In vivo Activity of Systemically Dosed siNA Molecules Delivered Via Intravenous Administration

[0908] Once the in vivo potency modified siNA against HBV was demonstrated by co-administration by HDI as described above, the level of anti-HBV activity of the molecule systemically dosed via conventional intravenous injection was investigated following the HDI delivery of the HBV vector. Since there have been reports of initial liver damage following hydrodynamic injection, dosing of siNAs was begun 72 hours post HDI. Examination of both liver ALT/AST levels and histopathology following HDI confirmed reports in the literature that the liver returns to near normal status by 72 hrs after the initial HDI induced injury (data not shown). To assess in vivo activity of systemically dosed siNA, 0.3 ug of the pWTD HBV vector was EDI administered, and 72 hours later the siNA or inverted controls were dosed via standard intravenous injection at 30, 10, or 3 ug/kg TID for 2 days. The animals were sacrificed 18 hours after the last dose and levels of serum HBV DNA were examined. FIG. 102 shows log10 copies/ml of serum HBV DNA for the siNA (Stab 7/8 33214/33254, Table III), inverted control (Stab 7/8 33578/33579, Table III), and saline treated groups. A dose dependent reduction in serum HBV DNA levels was observed in the siNA treated groups in comparison to the inverted control or saline groups. A statistically significant (P<0.01) reduction of 0.93 log was observed in the 30 mg/kg group as compared to the saline group. This result demonstrates in vivo activity of a systemically administered siNA. FIG. 103 shows activity of a fully stabilized siNA (Stab Active=33214/33254, Table III) construct compared to a matched chemistry inverted control (Stab Inv=33578/33579, Table III), an all RNA siNA construct having identical sequence (RNA active) and a corresponding all RNA inverted control (RNA Inv) in the HBV Co-HDI mouse model described above. A hydrodynamic tail vein injection (HDI) containing 1 ug of the pWTD HBV vector and 0, 0.03, 0.1, 0.3 or 1.0 ug of siNA was performed on C57BL/J6 mice. Active siNA duplexes and inverted sequence controls in both native RNA and stabilized chemistry were tested. The levels of serum HBV DNA and HBsAg were measured 72 hrs post injection. A dose dependent reduction in both HBV DNA and HBsAg levels was observed with both the native RNA and stabilized siNAs. However, the magnitude of the reduction observed in the stabilized siNAs treated groups was 1.5 log greater for both endpoints at the high dose level. FIG. 103A shows results for HBV serum DNA levels, FIG. 103B shows results for serum HBsAg levels, and FIG. 103C shows results for liver 1333V RNA levels in this study.

### Example 24

### Activity Screens Using Chemically Modified siNA

[0909] Two formats can be used to identify active chemically modified siNA molecules against target nucleic acid Molecules (e.g., RNA). One format involves screening unmodified siNA constructs in an appropriate system (e.g., cell culture or animal models) then applying chemical modifications to the sequence of identified leads and rescreening the modified constructs. Another format involves direct screening of chemically modified constructs to identify chemically modified leads (see for example the Stab 7/8 HCV screen shown in FIG. 86 and the Stab 7/8 HBV screen shown FIG. 87, as described above). The latter approach can be useful in identifying active constructs that are specific to various combinations of chemical modifications (e.g., Stab 1-18 chemistries shown in Table V herein). Additionally, different iterations of such chemical modifications can be assessed using active chemically modified leads and appropriate rules for selective active constructs given a particular chemisty can be established using this approach. Non-limiting examples of such activity screen are described below.

### Activity Screen of Stab 7/8 Constructs Targeting Luciferase RNA

[0910] HeLa cells were co-transfected with pGF3 vector (250 ng/well), renilla luciferase vector (10 ng/well) and siNA (0.5-25 nM) using 0.5 ul lipofectamine2000 per well. Twenty-four hours post-transfection, the cells were assayed for luciferase activity using the Promega Dual Luciferase Assay Kit per the manufacturer's instruction. siNA constructs having high levels of activity were identified and tested in a dose response assay with concentrations ranging from 0.5 to 25 nM. Results for siNA constructs targeting sites 80, 237, and 1478 are shown in FIG. 84 and sites 1544 and 1607 are shown in FIG. 85. As shown in the Figures, several active Stab 7/8 constructs were identified that demonstrate potent dose related inhibition of luciferase expression.

Activity Screen of Combination siNA Constructs Targeting HBV RNA in HepG2 Cells

[0911] The HBV HepG2 cell culture system described in Example 13 above was utilized to evaluate the efficacy of various combinations of chemical modifications (Table V) in the sense strand and antisense strand of siNA molecules as compared to matched chemistry inverted controls. To determine siNA activity, HbsAg levels were measured following transfection with siNA. Immulon 4 (Dynax) microtiter wells were coated overnight at 4° C. with anti-HBsAg Mab (Biostride B88-95-31ad,ay) at 1 rg/ml in Carbonate Buffer (Na2CO3 15 mM, NaHCO3 35 mM, pH 9.5). The wells were then washed 4× with PBST (PBS, 0.05% Tween® 20) and blocked for 1 hr at 37° C. with PBST, 1% BSA. Following washing as above, the wells were dried at 37° C. for 30 min. Biotinylated goat ant-HBsAg (Accurate YVS1807) was diluted 1:1000 in PBST and incubated in the wells for 1 hr. at 37° C. The wells were washed 4× with PBST. Streptavidin/Alkaline Phosphatase Conjugate (Pierce 21324) was diluted to 250 ng/ml in PBST, and incubated in the wells for 1 hr. at 37° C. After washing as above, p-nitrophenyl phosphate substrate (Pierce 37620) was added to the wells, which were then incubated for 1 hour at 37( C. The optical density at 450 run was then determined. Results of the combination HBV siNA screen are shown in FIGS. 88-90. As shown in the Figures, the various combinations of differing sense and antisense chemistries (e.g., sense/antisense constructs having Stab 7/8, 7/10, 7/11, 9/8, 9/10, 6/10, 16/8, 16/10, 18/8, 18/10, 4/8, 4/10, 7/5, 9/5, and 9/11 chemistry) result in active siNA constructs.

### Example 25

### Duplex Forming Oligonucleotide Mediated Inhibition of Gene Expression

### Palindromic Frequency Determination

[0912] In designing DFO constructs, the search for palindromic sites in target sequences can provide target sites well suited for DFO mediated inhibition of gene expression, as opposed to randomly screening sites for activity with non-DFO oligonucleotides. The length of palindrome can define the overall length of the DFO. The probability of the occurrence of various palindromes was calculated ranging from 6 nucleotides to 14 nucleotides in an artificially generated 200K-gene sequence via a MICROSOFT EXCEL algorithm (see FIG. 107). The simulation revealed that 6-mer palindromes typically occur once for every given 64-nucleotide sequence. An 8-mer palindrome was found to occur once for every 250-nucleotide sequence. These calculated frequencies matched well with the observed frequencies of palindrome in defined taret sequences. This allowed the estimation that approximately 78 6-mer palindromes should exist on average in any givent 5K gene. Evaluation for the presence of 6-mer palindromes in various genes resulted in a large number of palindromic sites identified (see FIG. 108). This algorithm considers only the Watson-Crick base pairs and excludes the presence of any mismatched and wobble base pairs. Including mismatches, wobble pairs and non-Watson-Crick base pairs can result in a large number of semi-palindromic sites suitable for the design of minimal duplex forming oligonucleotides.

[0913] To test the hypothesis that palindromic sites could be used for design and search for self-complementary oligos capable of inducing RNAi in mammalian cells, we randomly selected 12 paindromic sites in mTGFbR1 gene. These sites were included in the design of single strand .siRNA as described previously. None of these siRNAs contained TT overhangs in duplex form but contained an inverted abasic nucleotide to protect from 3′-exonucleases. Analysis of these DFOs for the RNAi response in E147Ts cells resulted in 4 out of 12 sequences that reduced mRNA levels to less than or equal to 40% at 25 nM concentration. Retesting the active sequences on a different day resulted in mRNA knock down by approximately 80%.

[0914] Identification of 4 active DFOs out of 12 is of the same order as the screening of standard 21 by siRNA duplexes for RNAi response. This indicates that self-complementary oligos could be an alternative for the design of second-generation drugs based on RNAi mechanism.

### Self Complementary DFO Constructs Targeting VEGFR1

[0915] Using the methods described herein, self complementary DFO constructs comprising palindrome or repeat nucleotide sequences were designed against VEGFR1 target RNA. These DFO constructs utilized the identification of palindromic or repeat sequences in a target nucleic acid sequence of interest, generally these palindrome/repeat sequences comprise about 2 to about 12 nucleotides in length were are selected to originate at the 5′-region of the target nucleic acid sequence. A nucleotide sequence that was complementary to target nucleic acid sequence adjacent (3′) to the palindrome/repeat sequence was incorporated at the 5′-end of the palindrome/repeat sequence in the DFO molecule. Lastly, a nucleic sequence that was inverse repeat of the sequence at the 5′ end of the palindrome/repeat sequence was inserted at the 3′ end of the palindrome/repeat sequence such that the full length DFO sequence comprised self complementary sequence. This design of DFO construct allows for the formation of a duplex oligonucleotide in which both strands comprise the same sequence (e.g., see FIG. 94). Generally, the longer the repeat identified in the target nucleic acid sequence, the shorter the resulting DFO sequence will be. For example, if the target sequence is 17 nucleotides in length and there is no repeat found in the sequence, the resulting DFO construct will be, for example, 17+0+17=34 nucleotides in length. The first 17 nucleotides represent sequence complementary to the target nucleic acid sequence, the 0 represents the lack of a palindrome sequence, and the second 17 nucleotides represent inverted repeat sequence of the first 17 nucleotides. If a 2 nucleotide repeat is utilized, the resulting DFO construct will be, for example, 15+2+15=32 nucleotides in length. If a 4 nucleotide repeat is utilized, the resulting DFO construct will be, for example, 13+4+13=30 nucleotides in length. If a 6 nucleotide repeat is utilized, the resulting DFO construct will be, for example, 11+6+11=28 nucleotides in length. If a 8 nucleotide repeat is utilized, the resulting DFO construct will be, for example, 9+8+9=26 nucleotides in length. If a 10 nucleotide repeat is utilized, the resulting DFO construct will be, for example, 7+10+7=24 nucleotides in length. If a 12 nucleotide repeat is utilized, the resulting DFO construct will be, for example, 5+12+5=22 nucleotides in length and so forth. Thus, for each nucleotide reduction in the target site, the DFO length can be shortened by 2 nucleotides. These same principles can be utilized for a target site having different length nucleotide sequences, such as target sites comprising 14 to 24 nucleotides. In addition, various combinations of 5′ and 3′ overhang sequences (e.g., TT) can be introduced to the DFO constructs designed with palindrome/repeat sequences. Furthermore, palindrome/repeat sequences can be added to the 5′-end of a DFO sequence having complementarity to any target nucleic acid sequence of interest, enabling self complementary palindrome/repeat DFO constructs to be designed against any target nucleic acid sequence (see for example FIGS. 95-96).

[0916] Self complementary DFO palindrome/repeat sequences shown in Table I (compound #32808, 32809, 32810, 32811, and 32812) were designed against VEGFR1 RNA targets and were screened in cell culture experiments along with chemically modified siNA constructs (compound #s 32748/32755, 33282/32289, 31270/31273) with known activity with matched chemistry inverted controls (compound #s 32772/32779, 32296/32303, 31276/31279) and untreated cells along with a trasfection control (LF2K), see FIG. 105. HAEC cells were transfected with 0.25 ug/well of lipid complexed with 25 nM DFO targeting VEGFR1 site 1229. Cells were incubated at 37° for 24 h in the continued presence of the DFO transfection mixture. At 24 h, RNA was prepared from each well of treated cells. The supernatants with the transfection mixtures were first removed and discarded, then the cells were lysed and RNA prepared from each well. Target gene expression following treatment was evaluated by RT-PCR for the VEGFR1 mRNA and for a control gene (36B4, an RNA polymerase subunit) for normalization. Compound #32812, a 29 nucleotide self complementary DFO construct targeting VEGFR1 site 1229 displayed potent inhibition of VEGFR1 RNA expression in this system (see for example FIG. 105).

### Self Complementary DFO Constructs Targeting HBV RNA

[0917] Self complementary DFO constructs comprising palindrome or repeat nucleotide sequences (see Table I) were designed against HBV target RNA and were screened in HepG2 cells. Transfection of the human hepatocellular carcinoma cell line, Hep G2, with replication-competent HBV DNA results in the expression of HBV proteins and the production of virions. The human hepatocellular carcinoma cell line Hep G2 was grown in Dulbecco's modified Eagle media supplemented with 10% fetal calf serum, 2 mM glutamine, 0.1 mM nonessential amino acids, 1 mM sodium pyruvate, 25 mM Hepes, 100 units penicillin, and 100 μg/ml streptomycin. To generate a replication competent cDNA, prior to transfection the HBV genomic sequences are excised from the bacterial plasmid sequence contained in the psHBV-1 vector. Other methods known in the art can be used to generate a replication competent cDNA. This was done with an EcoRI and Hind III restriction digest. Following completion of the digest, a ligation was performed under dilute conditions (20 μg/ml) to favor intermolecular ligation. The total ligation mixture was then concentrated using Qiagen spin columns.

[0918] To test the efficacy of DFOs targeted against HBV RNA, DFO duplexes targeting HBV pregenomic RNA were co-transfected with HBV genomic DNA once at 25 nM with lipid at 12.5 ug/ml into Hep G2 cells, and the subsequent levels of secreted HBV surface antigen (HBsAg) were analyzed by ELISA. A DFO construct comprising self complementary sequence (compound #32221) was assayed with a chemically modified siNA targeting HBV site 1580 (compound #31335/31337), a corresponding matched chemistry inverted control (compound #31336/31338), and untreated cells. The self complementary DFO construct was tested both as a preannealed duplex (compound #32221) or as a single stranded hairpin (compound #32221 fold), as confirmed by gel electrophoresis, (see FIG. 106). Immulon 4 (Dynax) microliter wells were coated overnight at 4° C. with anti-HBsAg Mab (Biostride B88-95-31ad,ay) at 1 ng/ml in Carbonate Buffer (Na2CO3 15 mM, NaHCO3 35 mM, pH 9.5). The wells were then washed 4× with PBST (PBS, 0.05% Tween® 20) and blocked for 1 hr at 37° C. with PBST, 1% BSA. Following washing as above, the wells were dried at 37( C for 30 min. Biotinylated goat anti-HBsAg (Accurate YVS1807) was diluted 1:1000 in PBST and incubated in the wells for 1 hr. at 37( C. The wells were washed 4× with PBST. Streptavidin/Alkaline Phosphatase Conjugate (Pierce 21324) was diluted to 250 ng/ml in PBST, and incubated in the wells for 1 hr. at 37( C. After washing as above, p-nitrophenyl phosphate substrate (Pierce 37620) was added to the wells, which were then incubated for 1 hour at 37( C. The optical density at 450 nm was then determined. As shown in FIG. 106, the self complementary DFO construct 32221 in duplex form shows significant inhibition of HBsAg.

### Self Complementary DFO Constructs Targeting TGF-Beta Receptor RNA

[0919] Using the methods described herein, self complementary DFO constructs comprising palindrome or repeat nucleotide sequences were designed against TGF-beta receptor target RNA. Self complementary DFO palindrome/repeat sequences shown in Table I (e.g., compound #35038, 35041, 35044, and 35045) were designed against TGF-beta receptor RNA targets and were screened in cell culture experiments and irrelevant controls (Control 1, Control 2) and untreated cells along with a trasfection control (LF2K), see FIG. 109. NMuMg cells were transfected with 0.5 uL/well of lipid complexed with 25 and 100 nM DFO. Cells were incubated at 37° for 24 h in the continued presence of the DFO transfection mixture. At 24 h, RNA was prepared from each well of treated cells. The supernatants with the transfection mixtures were first removed and discarded, then the cells were lysed, and RNA prepared from each well. Target gene expression following treatment was evaluated by RT-PCR for the TGF-beta receptor mRNA and for a control gene (36B4, an RNA polymerase subunit) for normalization. As shown in FIG. 109, the DFO constructs displayed potent inhibition of TGF-beta receptor RNA expression in this system.

### Example 26

### Multifunctional siNA Mediated Inhibition of Gene Expression

[0920] Multifunctional siNA Design

[0921] Once target sites have been identified for multifunctional siNA constructs, each strand of the siNA is designed with a complementary region of length, for example, between about 18 and about 28 nucleotides, that is complementary to a different target nucleic acid sequence. Each complementary region is designed with an adjacent flanking region of about 4 to about 22 nucleotides that is not complementary to the target sequence, but which comprises complementarity to the complementary region of the other sequence (see for example FIG. 96). Hairpin constructs can likewise be designed (see for example FIG. 97). Identification of complementary, palindrome or repeat sequences that are shared between the different target nucleic acid sequences can be used to shorten the overall length of the multifunctional siNA constructs (see for example FIGS. 98 and 99).

[0922] In a non-limiting example, a multifunctional siNA is designed to target two separate nucleic acid sequences. The goal is to combine two different siNAs together in one siNA that is active against two different targets. The siNAs are joined in a way that the 5′ of each strand starts with the “antisense” sequence of one of two siRNAs as shown in italics below.

SEQ ID NO: 1124

3′ TTAGAAACCAGACGUAAGUGU GGUACGACCUGACGACCGU 5′

SEQ ID NO: 1125

5′ UCUUUGGUCUGCAUUCACAC CAUGCUGGACUGCUGGCATT3′

[0923] RISC is expected to incorporate either of the two strands from the 5′ end. This would lead to two types of active RISC populations carrying either strand. The 5′ 19 nt of each strand will act as guide sequence for degradation of separate target sequences.

[0924] In another example, the size of multifunctional siNA molecules is reduced by either finding overlaps or truncating the individual siNA length. The exemplary excercise described below indicates that for any given first target sequence, a shared complementary sequence in a second target sequence is likely to be found.

[0925] The number of spontaneous matches of short polynucleotide sequences (e.g., less than 14 nucleotides) that are expected to occur between two longer sequences generated independent of one another was investigated. A simulation using the uniform random generator SAS V8.1 utilized a 4,000 character string that was generated as a random repeating occurrence of the letters {ACGU}. This sequence was then broken into the nearly 4000 overlapping sets formed by taking Si as the characters from positions (1,2 . . . n), S2 from positions (2,3 . . . , n+1) completely through the sequence to the last set, S 4000−n+1 from position (4000−n+1, . . . ,4000). This process was then repeated for a second 4000 character string. Occurrence of same sets (of size n) were then checked for sequence identity between the two strings by a sorting and match-merging routine. This procedure was repeated for sets of 9-11 characters. Results were an average of 55 matching sequences of length n=9 characters (range 39 to 72); 13 common sets (range 6 to 18) for size n=10, and 4 matches on average (range 0 to 6) for sets of 11 characters. The choice of 4000 for the original string length is approximately the length of the coding region of both VEGFR1 and VEGFR2. This simple simulation suggests that any two long coding regions formed independent of one-another will share common short sequences that can be used to shorten the length of multifunctional siNA constructs. In this example, common sequences of size 9 occurred by chance alone in >1% frequency.

[0926] Below is an example of a multifunctional siNA construct that targets VEGFR1 and VEGFR2 in which each strand has a total length of 24 nt with a 14 nt self complementary region (underline). The antisense region of each siNA ‘1’ targeting VEGFR1 and siNA ‘2’ targeting VEGFR2 (complementary regions are shown in italic) are used

| | |
|---|---|
| siNA ‘1’ | |
| 5′CAAUUAGAGUGGCAGUGAG | (SEQ ID NO: 1126) |
| 3′ GUUAAUCUCACCGUCACUC | (SEQ ID NO: 1127) |
| siNA ‘2’ | |
| AGAGUGGCAGUGAGCAAAG 5′ | (SEQ ID NO: 1128) |
| UCUCACCGUCACUCGUUUC 3′ | (SEQ ID NO: 1129) |
| Multifunctional siNA | |
| CAAUUAGAGUGGCAGUGAGCAAAG | (SEQ ID NO: 1130) |
| GUUAAUCUCACCGUCACUCGUUUC | (SEQ ID NO: 1131) |

[0927] In another example, the length of a multifunctional siNA construct is reduced by determining whether fewer base pairs of sequence homology to each target sequence can be tolerated for effective RNAi activity. If so, the overall length of multifunctional siNA can be reduced as shown below. In the following hypothetical example, 4 nucleotides (bold) are reduced from each 19 nucleotide siNA ‘1’ and siNA ‘2’ constructs. The resulting multifunctional siNA is 30 base pairs long.

| | |
|---|---|
| siNA ‘1’ | |
| 5′CAAUUAGAGUGGCAG [symbol] | (SEQ ID NO: 1126) |
| 3′ GUUAAUCUCACCGUCACUC | (SEQ ID NO: 1127) |
| siNA ‘2’ | |
| AGAGUGGCAGUGAGCAAAG 5′ | (SEQ ID NO: 1128) |
| [symbol] ACCGUCACUCGUUUC 3′ | (SEQ ID NO: 1129) |
| Multifunctional siNA | |
| CAAUUAGAGUGGCAGUGGCAGUGAGCAAAG | (SEQ ID NO: 1132) |
| GUUAAUCUCACCGUCACCGUCACUCGUUUC | (SEQ ID NO: 1133) |

Multifunctional siNA Constructs Targeting HBV and PKC-Alpha RNA

[0928] In a non-limiting example, multifunctional siNA constructs targeting HBV and PKC-alpha RNA were evaluated for activity (see FIGS. 110 and 111). Multifunctional siNAs are referred to by compound numbers cross referenced in Table I. Total RNA was prepared from HepG2 cells 72 h after treatment with 25 nM normal (single target) and bifunctional siNAs. Quantitative RT-PCR was performed using the Invitrogen SuperScript III Platinum One-Step Quantitative RT-PCR System on an ABI PRISM 7700 Sequence Detector instrument. PCR products were normalized against those for 36B4. PKC-alpha site 1143 is targeted by the PKC-alpha-only and HBV-PKC-alpha combination siNAs. As shown if FIG. 110, the multifunctional siNAs targeting HBV-PKC-alpha (34710/34711 and 34712/34713) are effective in inhibiting HBV RNA expression at levels similar to individual siNA molecules targeting HBV sites 263 and 1583, as compared to appropriate controls (HBV inverted control siNA to site 263; irrelevant bifunctional VEGFR1/VEGF control; and a siNA construct targeting PKC-alpha site 1143 only). As shown if FIG. 111, the multifunctional siNAs targeting HBV-PKC-alpha (34710/34711 and 34712/34713) are effective in inhibiting PKC-alpha RNA expression at levels similar to an individual siNA molecule targeting PKC-alpha site 1143, as compared to appropriate controls (irrelevant bifunctional VEGFR1/VEGF control; and siNA constructs targeting HBV sites 263 and 1583, and untreated cells).

Additional Multifuctional siNA Designs

[0929] Three categories of additional multifunctional siNA designs are presented that allow a single siRNA molecule to silence multiple targets. The first method utilizes linkers to join siNAs (or multiunctional siNAs) in a direct manner. This can allow the most potent siNAs to be joined without creating a long, continuous stretch of RNA that has potential to trigger an interferon response. The second method is a dendrimeric extension of the overlapping or the linked multifunctional design; or alternatively the organization of siNA in a supramolecular format. The third method uses helix lengths greater than 30 base pairs. Processing of these siNAs by Dicer will reveal new, active 5′ antisense ends. Therefore, the long siNAs can target the sites defined by the original 5′ ends and those defined by the new ends that are created by Dicer processing. When used in combination with traditional multifunctional siNAs (where the sense and antisense strands each define a target) the approach can be used for example to target 4 or more sites.

I. Tethered Bifunctional siNAs

[0930] The basic idea is a novel approach to the design of multifunctional siNAs in which two antisense siNA strands are annealed to a single sense strand. The sense strand oligonucleotide contains a linker (e.g., non-nulcoetide linker as described herein) and two segments that anneal to the antisense siNA strands (see FIG. 112). The linkers can also optionally comprise nucleotide-based linkers. Several potential advantages and variations to this approach include, but are not limited to:
[0931] 1. The two antisense siNAs are independent. Therefore, the choice of target sites is not constrained by a requirement for sequence conservation between two sites. Any two highly active siNAs can be combined to form a multifunctional siNA.
[0932] 2. When used in combination with target sites,having homology, siNAs that target a sequence present in two genes (e.g., Flt-1 site 3646, which targets VEGF-R1 and R2), the design can be used to target more than two sites. A single multifunctional siNA can be for example, used to target VEGF R1 RNA and VEGF R2 RNA (using one antisense strand of the multifunctional siNA targeting of conserved sequence between to the two RNAs) and VEGF RNA (using the second antisense strand of the multifunctional siNA targeting VEGF RNA This approach allows targeting of the cytokins and its two main receptors using a single multifunctional siNA.
[0933] 3. Multifunctional siNAs that use both the sense and antisense strands to target a gene can also be incorporated into a tethered multifuctional design. This leaves open the possibility of targeting 6 4 or more sites with a single complex.
[0934] 4. It can be possible to anneal more than two antisense trandssiNAs to a single tethered sense strands.
[0935] 5. The design avoids long continuous stretches of dsRNA. Therefore, it is less likely to initiate an interferon response.
[0936] 6. The linker (or modifications attached to it, such as conjugates described herein) can improve the pharmacokinetic properties of the complex or improve its incorporation into liposomes. Modifications introduced to the linker should not impact siNA activity to the same extent that they would if directly attached to the siNA (see for example FIGS. 118 and 119).
[0937] 7. The sense strand can extend beyond the annealed antisense strands to provide additional sites for the attachment of conjugates.
[0938] 8. The polarity of the complex can be switched such that both of the antisense 3′ ends are adjacent to the linker and the 5′ ends are distal to the linker or combination thereof.
   Dendrimer and Supramolecular siNAs

[0939] In the dendrimer siNA approach, the synthesis of siNA is initiated by first synthesizing the dendrimer template followed by attaching various functional siNAs. Various constructs are depicted in FIG. 113. The number of functional siNAs that can be attached is only limited by the dimensions of the dendrimer used.

Supramolecular Approach to Multifunctional siNA

[0940] The supramolecular format simplifies the challenges of dendrimer synthesis. In this format, the siNA strands are synthesized by standard RNA chemistry, followed by annealing of various complementary strands. The individual strand synthesis contains an antisense sense sequence of one siNA at the 5′-end followed by a nucleic acid or synthetic linker, such as hexaethyleneglyol, which in turn is followed by sense strand of another siNA in 5′ to 3′ direction. Thus, the synthesis of siNA strands can be carried out in a standard 3′ to 5′ direction. Representative examples of trifunctional and tetrafunctional siNAs are depicted in FIG. 114. Based on. a similar principle, higher functionality siNA constucts can be designed as long as efficient annealing of various strands is achieved.

Dicer Enabled Multifunctional siNA

[0941] Using bioinformatic analysis of multiple targets, stretches of identical sequences shared between differeing target sequences can be identified ranging from about two to about fourteen nucleotides in length. These identical regions can be designed into extended siNA helixes (e.g., >30 base pairs) such that the processing by Dicer reveals a secondary functional 5′-antisense site (see for example FIG. 115). For example, when the first 17 nucleotides of a siNA antisense strand (e.g., 21 nucleotide strands in a duplex with 3′-TT overhangs) are complementary to a target RNA, robust silencing was observed at 25 nM. 80% silencing was observed with only 16 nucleotide complementarity in the same format (see FIG. 117).

[0942] Incorporation of this property into the designs of siNAs of about 30 to 40 or more base pairs results in additional multifunctional siNA constructs. The example in FIG. 115 illustrates how a 30 base-pair duplex can target three distinct sequences after processing by Dicer-RNaseIII; these sequences can be on the same mRNA or separate RNAs, such as viral and host factor messages, or multiple points along a given pathway (e.g., inflammatory cascades). Furthermore, a 40 base-pair duplex can combine a bifunctional design in tandem, to provide a single duplex targeting four target sequences. An even more extensive approach can include use of homologous sequences (e.g. VEGFR-1/VEGFR-2) to enable five or six targets silenced for one multifunctional duplex. The example in FIG. 115 demonstrates how this can be achieved. A 30 base pair duplex is cleaved by Dicer into 22 and 8 base pair products from either end (8 b.p. fragments not shown). For ease of presentation the overhangs generated by dicer are not shown—but can be compensated for. Three targeting sequences are shown. The required sequence identity overlapped is indicated by grey boxes. The N's of the parent 30 b.p. siNA are suggested sites of 2′-OH positions to enable Dicer cleavage if this is tested in stabilized chemistries. Note that processing of a 30 mer duplex by Dicer RNase III does not give a precise 22+8 cleavage, but rather produces a series of closely related products (with 22+8 being the primary site). Therefore, processing by Dicer will yield a series of active siNAs. Another non-limiting example is shown in FIG. 116. A 40 base pair duplex is cleaved by Dicer into 20 base pair products from either end. For ease of presentation the overhangs generated by dicer are not shown—but can be compensated for. Four targeting sequences are shown in four colors, blue, light-blue and red and orange. The required sequence identity overlapped is indicated by grey boxes. This design format can be extended to larger RNAs. If chemically stabilized siNAs are bound by Dicer, then strategically located ribonucleotide linkages can enable designer cleavage products that permit our more extensive repertoire of multiifunctional designs. For example cleavage products not limited to the Dicer standard of approximately 22-nucleotides can allow multifunctional siNA constructs with a target sequence identity overlap ranging from, for example, about 3 to about 15 nucleotides.

[0943] Another important aspect of this approach is its ability to restrict escape mutants. Processing to reveal an internal target site can ensure that escape mutations complementary to the eight nucleotides at the antisense 5′ end will not reduce sINA effectiveness. If about 17 nucleotidest of complementarity are required for RISC-mediated target cleavage, this will restrict, for example 8/17 or 47% of potential escape mutants.

### Example 27

### siNA Length and Base Pair Walking Experiments

[0944] siNA Length Walk

[0945] An experiment was designed to determine the effect of based paired sequence length of siNA constructs on RNAi efficacy. A well characterized site for siNA mediated inhibition, HBV RNA site 263 was chosen and siNA molecules ranging in length from 19 to 39 ribonucleotide base pairs in length with 3′-terminal dinucleotide TT overhangs. Transfection of the human hepatocellular carcinoma cell line, Hep G2, with replication-competent HBV DNA results in the expression of HBV proteins and the production of virions. To test the efficacy of differening length siNAs targeted against HBV RNA, several siNA duplexes targeting site 263 within HBV pregenomic RNA were co-transfected with HBV genomic DNA once at 25 nM with lipid at 12.5 ug/ml into Hep G2 cells, and the subsequent levels of HBV RNA analyzed by RT PCR compared to cells treated with an inverted siNA control to site 263 and untreated cells. Results are summarized in FIG. 120. As shown in the figure, the siNA constructs from 19 to 39 base pairs were all efficacious in inhibiting HBV RNA in this system.

siNA Length Walk

[0946] An experiment was designed to determine the effect of varying the number of nucleotides complementary to a target RNA within a fixed length siNA on RNAi efficacy. siNA molecules ranging from 14 to 18 ribonucleotide base pairs with a fixed length of 21 nucleotides that included 3′-terminal dinucleotide TT overhangs were designed to target HBV site 263 RNA. Transfection of the human hepatocellular carcinoma cell line, Rep G2, with replication-competent HBV DNA results in the expression of EIBV proteins and the production of virions. To test the efficacy of differening base pair composition siNAs targeted against HBV RNA, the siNA duplexes targeting site 263 within HBV pregenomic RNA were co-transfected with HBV genomic DNA once at 25 nM with lipid at 12.5 ug/ml into Hep G2 cells, and the subsequent levels of HBV RNA analyzed by RT PCR as compared to cells treated with an inverted siNA control to site 263 and untreated cells. Results are summarized in FIG. 117. As shown in the figure, the siNA constructs with 16, 17, and 18 base pairs within a 21 nucleotide construct were all efficacious in inhibiting HBV RNA in this system, whereas the corresponding 16, 17, and 18 base pair constructs with an overall length of 18, 19, and 20 nucleotides respectively were also efficacious, but to a lesser extent. As such, this data suggests that the overall length of a siNA can be more determinative in providing RNAi efficacy than the absolute number of base paired nucleotides. For example, a siNA having fewer than 19 base pairs (e.g. 18, 17, or 16 base pairs) within a longer oligonucleotide (e.g. 20 or more nucleotides) can still be effective in mediating RNA interference.

[0947] All patents and publications mentioned in the specification are indicative of the levels of skill of those skilled in the art to which the invention pertains. All references cited in this disclosure are incorporated by reference to the same extent as if each reference had been incorporated by reference in its entirety individually.

[0948] One skilled in the art would readily appreciate that the present invention is well adapted to carry out the objects and obtain the ends and advantages mentioned, as well as those inherent therein. The methods and compositions described herein as presently representative of preferred embodiments are exemplary and are not intended as limitations on the scope of the invention. Changes therein and other uses will occur to those skilled in the art, which are encompassed within the spirit of the invention, are defined by the scope of the claims.

[0949] It will be readily apparent to one skilled in the art that varying substitutions and modifications can be made to the invention disclosed herein without departing from the scope and spirit of the invention. Thus, such additional embodiments are within the scope of the present invention and the following claims. The present invention teaches one skilled in the art to test various combinations and/or substitutions of chemical modifications described herein toward generating nucleic acid constructs with improved activity for mediating RNAi activity. Such improved activity can comprise improved stability, improved bioavailability, and/or improved activation of cellular responses mediating RNAi. Therefore, the specific embodiments described herein are not limiting and one skilled in the art can readily appreciate that specific combinations of the modifications described herein can be tested without undue experimentation toward identifying siNA molecules with improved RNAi activity.

[0950] The invention illustratively described herein suitably can be practiced in the absence of any element or elements, limitation or limitations that are not specifically disclosed herein. Thus, for example, in each instance herein any of the terms “comprising”, “consisting essentially of”, and “consisting of” may be replaced with either of the other two terms. The terms and expressions which have been employed are used as terms of description and not of limitation, and there is no intention that in the use of such terms and expressions of excluding any equivalents of the features shown and described or portions thereof, but it is recognized that various modifications are possible within the scope of the invention claimed. Thus, it should be understood that although the present invention has been specifically disclosed by preferred embodiments, optional features, modification and variation of the concepts herein disclosed may be resorted to by those skilled in the art, and that such modifications and variations are considered to be within the scope of this invention as defined by the description and the appended claims.

[0951] In addition, where features or aspects of the invention are described in terms of Markush groups or other grouping of alternatives, those skilled in the art will recognize that the invention is also thereby described in terms of any individual member or subgroup of members of the Markush group or other group.

TABLE I

| Sirna/RPI# | Aliases | Sequence | SEQ ID# |
|---|---|---|---|
| 25227 | Sirna/RPI 21550 EGFR 3830L23 AS as siNA Str 1 (sense) | B UAACCUCGUACUGGUGCCUCC B | 1 |
| 25228 | Sirna/RPI 21550 EGFR 3830L23 AS as siNA Str 2 | B GGAGGCACCAGUACGAGGUUA B | 2 |
| | (antisense) | | |
| 25229 | Sirna/RPI 21549 EGFR as siNA Str 2 (antisense) | B AAACUCCAAGAUCCCCAAUCA B | 3 |
| 25230 | Sirna/RPI 21549 EGFR 3 as siNA Str 1 (sense) | B UGAUUGGGGAUCUUGGAGUUU B | 4 |
| 25231 | Sirna/RPI 21547EGFR as siNA Str 2 (antisense) | B GUUGGAGUCUGUAGGACUUGG B | 5 |
| 25232 | Sirna/RPI 21547EGFR as siNA Str 1 (sense) | B CCAAGUCCUACAGACUCCAAC B | 6 |
| 25233 | Sirna/RPI 21545 EGFR as siNA Str 2 (antisense) | B GCAAAAACCCUGUGAUUUCCU B | 7 |
| 25234 | Sirna/RPI 21545 EGFR as siNA Str 1 (sense) | B AGGAAAUCACAGGGUUUUUGC B | 8 |
| 25235 | Sirna/RPI 21543 EGFR as siNA Str 2 (antisense) | B UUGGUCAGUUUCUGGCAGUUC B | 9 |
| 25236 | Sirna/RPI 21543 EGFR as siNA Str 1 (sense) | B GAACUGCCAGAAACUGACCAA B | 10 |
| 25237 | HCV IRES Loop IIIb (Heptazyme site) as siNA str1 (sense) | B GGUCCUUUCUUGGAUCAACCC B | 11 |
| 25238 | HCV IRES Loop IIIb (Heptazyme site) as siNA str2 | B GGGUUGAUCCAAGAAAGGACC B | 12 |
| | (antisense) | | |
| 25239 | HBV (HepBzyme site) as siNA str1 (sense) | B UGGACUUCUCUCAAUUUUCUA B | 13 |
| 25240 | HBV (HepBzyme site) as siNA str2 (antisense) | B UAGAAAAUUGAGAGAAGUCCA B | 14 |
| 25241 | HBV18371 site as siNA str1(sense) | B UUUUUCACCUCUGCCUAAUCA B | 15 |
| 25242 | HBV18371 site as siNA str2 (antisense) | B UGAUUAGGCAGAGGUGAAAAA B | 16 |
| 25243 | HBV16372-18373 site as siNA str1(sense) | B CAAGCCUCCAAGCUGUGCCUU B | 17 |
| 25244 | HBV16372-18373 site as siNA str 2 (antisense) | B AAGGCACAGCUUGGAGGCUUG B | 18 |
| 25245 | Sirna/RPI 17763 Her2Neu AS as siNA Str 2 (antisense) | B UCCAUGGUGCUCACUGCGGCU B | 19 |
| 25246 | Sirna/RPI 17763 Her2Neu AS as siNA Str 1 (sense) | B AGCCGCAGUGAGCACCAUGGA B | 20 |
| 25247 | Sirna/RPI 17763 Her2Neu AS as siNA Str 1 (sense) | B AGGUACCACGAGUGACGCCGA B | 21 |
| | Inverted control | | |
| 25248 | Sirna/RPI 17763 Her2Neu AS as siNA Str 1 (sense) | B UCGGCGUCACUCGUGGUACCU B | 22 |
| | Inverted control compliment | | |
| 25249 | Sirna/RPI 21550 EGFR 3830L23 AS as siNA Str 1 (sence) | B CCUCCGUGGUCAUGCUCCAAU B | 23 |
| | Inverted Control | | |
| 25250 | Sirna/RPI 21550 EGFR 3830L23 AS as siNA Str 1 (sence) | B AUUGGAGCAUGACCACGGAGG B | 24 |
| | Inverted Control Compliment | | |
| 25251 | HCV IRES Loop IIIb (Heptazyme site) as siNA str1 (sense) | B CCCAACUAGGUUCUUUCCUGG B | 25 |
| | Inverted Control | | |
| 25252 | HCV IRES Loop IIIb (Heptazyme site) as siNA str1 (sense) | B CCAGGAAAGAACCUAGUUGGG B | 26 |
| | Inverted Control Compliment | | |
| 25804 | Sirna/RPI 21550 EGFR 3830L23 AS as siNA Str 1 (sense) + | UAACCUCGUACUGGUGCCUCCUU | 27 |
| | 2U overhang | | |
| 25805 | Sirna/RPI 21550 EGFR 3830L23 AS as siNA Str 2 | GGAGGCACCAGUACGAGGUUAUU | 28 |
| | (antisense) + 2U overhang | | |
| 25806 | Sirna/RPI 21549 EGFR as siNA Str 2 (antisense) + 2U | AAACUCCAAGAUCCCCAAUCAUU | 29 |
| | overhang | | |
| 25824 | Sirna/RPI 21550 EGFR 3830L23 AS as siNA Str 1 (sense) + | BUAACCUCGUACUGGUGCCUCCUUB | 30 |
| | 2U overhang | | |
| 25825 | Sirna/RPI 21550 EGFR 3830L23 AS as siNA Str 2 | BGGAGGCACCAGUACGAGGUUAUUB | 31 |
| | (antisense) + 2U overhang | | |
| 25826 | Sirna/RPI 21549 EGFR as siNA Str 2 (antisense) + 2U | BAAACUCCAAGAUCCCCAAUCAUUB | 32 |
| | overhang | | |
| 25807 | Sirna/RPI 21549 EGFR 3 as siNA Str 1 (sense) + 2U | UGAUUGGGGAUCUUGGAGUUUUU | 33 |
| | overhang | | |
| 25808 | Sirna/RPI 21547EGFR as siNA Str 2 (antisense) + 2U | GUUGGAGUCUGUAGGACUUGGUU | 34 |
| | overhang | | |
| 25809 | Sirna/RPI 21547EGFR as siNA Str 1 (sense) + 2U | CCAAGUCCUACAGACUCCAACUU | 35 |
| | overhang | | |
| 25827 | Sirna/RPI 21549 EGFR 3 as siNA Str 1 (sense) + 2U | BUGAUUGGGGAUCUUGGAGUUUUUB | 36 |
| | overhang | | |
| 25828 | Sirna/RPI 21547EGFR as siNA Str 2 (antisense) + 2U | BGUUGGAGUCUGUAGGACUUGGUUB | 37 |
| | overhang | | |
| 25829 | Sirna/RPI 21547EGFR as siNA Str 1 (sense) + 2U | BCCAAGUCCUACAGACUCCAACUUB | 38 |
| | overhang | | |
| 25810 | Sirna/RPI 21545 EGFR as siNA Str 2 (antisense) + 2U | GCAAAAACCCUGUGAUUUCCUUU | 39 |
| | overhang | | |
| 25811 | Sirna/RPI 21545 EGFR as siNA Str 1 (sense) + 2U | AGGAAAUCACAGGGUUUUUGCUU | 40 |
| | overhang | | |
| 25812 | Sirna/RPI 21543 EGFR as siNA Str 2 (antisense) + 2U | UUGGUCAGUUUCUGGCAGUUCUU | 41 |
| | overhang | | |
| 25830 | Sirna/RPI 21545 EGFR as siNA Str 2 (antisense) + 2U | BGCAAAAACCCUGUGAUUUCCUUUB | 42 |
| | overhang | | |
| 25831 | Sirna/RPI 21545 EGFR as siNA Str 1 (sense) + 2U | BAGGAAAUCACAGGGUUUUUGCUUB | 43 |
| | overhang | | |
| 25832 | Sirna/RPI 21543 EGFR as siNA Str 2 (antisense) + 2U | BUUGGUCAGUUUCUGGCAGUUCUUB | 44 |
| | overhang | | |
| 25813 | Sirna/RPI 21543 EGFR as siNA Str 1 (sense) + 2U | GAACUGCCAGAAACUGACCAAUU | 45 |
| | overhang | | |
| 25814 | HCV IRES Loop IIIb (Heptazyme site) as siNA str1 | GGUCCUUUCUUGGAUCAACCCUU | 46 |
| | (sense) + 2U overhang | | |
| 25815 | HCV IRES Loop IIIb (Heptazyme site) as siNA str2 | GGGUUGAUCCAAGAAAGGACCUU | 47 |
| | (antisense) + 2U overhang | | |
| 25833 | Sirna/RPI 21543 EGFR as siNA Str 1 (sense) + 2U | BGAACUGCCAGAAACUGACCAAUUB | 48 |
| | overhang | | |
| 25834 | HCV IRES Loop IIIb (Heptazyme site) as siNA str1 | BGGUCCUUUCUUGGAUCAACCCUUB | 49 |
| | (sense) + 2U overhang | | |
| 25835 | HCV IRES Loop IIIb (Heptazyme site) as siNA str2 | BGGGUUGAUCCAAGAAAGGACCUUB | 50 |
| | (antisense) + 2U overhang | | |
| 25816 | HBV (HepBzyme site) as siNA str1(sense) + 2U overhang | UGGACUUCUCUCAAUUUUCUAUU | 51 |
| 25817 | HBV (HepBzyme site) as siNA str2 (antisense) + 2U | UAGAAAAUUGAGAGAAGUCCAUU | 52 |
| | overhang | | |
| 25818 | HBV18371 site as siNA str1(sense) + 2U overhang | UUUUUCACCUCUGCCUAAUCAUU | 53 |
| 25836 | HBV (HepBzyme site) as siNA str1(sense) + 2U overhang | BUGGACUUCUCUCAAUUUUCUAUUB | 54 |
| 25837 | HBV (HepBzyme site) as siNA str2 (antisense) + 2U | BUAGAAAAUUGAGAGAAGUCCAUUB | 55 |
| | overhang | | |
| 25838 | HBV18371 site as siNA str1(sense) + 2U overhang | BUUUUUCACCUCUGCCUAAUCAUUB | 56 |
| 25819 | HBV18371 site as siNA str2 (antisense) + 2U overhang | UGAUUAGGCAGAGGUGAAAAAUU | 57 |
| 25820 | HBV16372-18373 site as siNA str1(sense) + 2U overhang | CAAGCCUCCAAGCUGUGCCUUUU | 58 |
| 25821 | HBV16372-18373 site as siNA str 2 (antisense) + 2U | AAGGCACAGCUUGGAGGCUUGUU | 59 |
| | overhang | | |
| 25839 | HBV18371 site as siNA str2 (antisense) + 2U overhang | BUGAUUAGGCAGAGGUGAAAAAUUB | 60 |
| 25840 | HBV16372-18373 site as siNA str1(sense) + 2U overhang | BCAAGCCUCCAAGCUGUGCCUUUUB | 61 |
| 25841 | HBV16372-18373 site as siNA str 2 (antisense) + 2U | BAAGGCACAGCUUGGAGGCUUGUUB | 62 |
| | overhang | | |
| 25822 | Sirna/RPI 17763 Her2Neu AS as siNA Str 2 | UCCAUGGUGCUCACUGCGGCUUU | 63 |
| | (antisense) + 2U overhang | | |
| 25823 | Sirna/RPI 17763 Her2Neu AS as siNA Str 1 (sense) + 2U | AGCCGCAGUGAGCACCAUGGAUU | 64 |
| | overhang | | |
| 25842 | Sirna/RPI 17763 Her2Neu AS as siNA Str 2 | BUCCAUGGUGCUCACUGCGGCUUUB | 65 |
| | (antisense) + 2U overhang | | |
| 25843 | Sirna/RPI 17763 Her2Neu AS as siNA Str 1 (sense) + 2U | BAGCCGCAGUGAGCACCAUGGAUUB | 66 |
| | overhang | | |
| 27649 | Sirna/RPI GL2 Str1 (sense) | CGUACGCGGAAUACUUCGA TT | 67 |
| 27650 | Sirna/RPI GL2 Str2 (antisense) | UCGAAGUAUUCCGCGUACG TT | 68 |
| 27651 | Sirna/RPI Inverted GL2 Str1 (sense) | AGCUUCAUAAGGCGCAUGC TT | 69 |
| 27652 | Sirna/RPI Inverted GL2 Str2 (antisense) | GCAUGCGCCUUAUGAAGCU TT | 70 |
| 27653 | Sirna/RPI GL2 Str1 (sense) all ribo P = S | CsGsUsAsCsGsCsGsGsAsAsUsAsCsUsUsCsGsA TT | 71 |
| 27654 | Sirna/RPI GL2 Str1 (sense) all ribo pyrimidines P = S | CsGUsACsGCsGGAAUsACsUsUsCsGA TT | 72 |
| 27655 | Sirna/RPI GL2 Str1 (sense) 14 5′ P = S | CsGsUsAsCsGsCsGsGsAsAsUsAsCsUUCGA TT | 73 |
| 27656 | Sirna/RPI GL2 Str1 (sense) 10 5′ P = S | CsGsUsAsCsGsCsGsGsAsAUACUUCGA TT | 74 |
| 27657 | Sirna/RPI GL2 Str1 (sense) 5 5′ P = S | CsGsUsAsCsGCGGAAUACUUCGA TT | 75 |
| 27658 | Sirna/RPI GL2 Str2 (antisense) all ribo P = S | UsCsGsAsAsGsUsAsUsUsCsCsGsCsGsUsAsCsG TT | 76 |
| 27659 | Sirna/RPI GL2 Str2 (antisense) all ribo pyrimidines P = S | UsCsGAAGUsAUsUsCsCsGCsGUsACsG TT | 77 |
| 27660 | Sirna/RPI GL2 Str2 (antisense) 5′ 14 P = S | UsCsGsAsAsGUsAsUsUsCsCsGsCsGUACG TT | 78 |
| 27661 | Sirna/RPI GL2 Str2 (antisense) 5′ 10 P = S | UsCsGsAsAsGsUsAsUsUsCCGCGUACG TT | 79 |
| 27662 | Sirna/RPI GL2 Str2 (antisense) 5′ 5 P = S | UsCsGsAsAsGUAUUCCGCGUACG TT | 80 |
| 28010 | Sirna/RPI GL2 Str1 (sense) 5′ligation fragment | CGUACG | 81 |
| 28011 | Sirna/RPI GL2 Str1 (sense) 3′ ligation fragment | CGGAAUACUUCGATT | 82 |
| 28012 | Sirna/RPI GL2 Str2 (antisense) 5′ ligation fragment | UCGAAGUA | 83 |
| 28013 | Sirna/RPI GL2 Str2 (antisense) 3′ligation fragment | UUCCGCGUACGTT | 84 |
| 28254 | Sirna/RPI GL2 Str1 (sense) all pyrimidines + TT = PS | CsGUsACsGCsGGAAUsACsUsUsCsGATsT | 85 |
| 28255 | Sirna/RPI GL2 Str2 (antisense), + TT = PS | UCGAAGUAUUCCGCGUACGTsT | 86 |
| 28256 | Sirna/RPI GL2 Str2 (antisense), all pyrimidines+ TT = PS | UsCsGAAGUsAUsUsCsCsGCsGUsACsGTsT | 87 |
| 28262 | Her2.1.sense Str1 (sense) | UGGGGUCGUCAAAGACGUUTT | 88 |
| 28263 | Her2.1.antisense Str2 (antisense) | AACGUCUUUGACGACCCCATT | 89 |
| 28264 | Her2.1.sense Str1 (sense) inverted | UUGCAGAAACUGCUGGGGUTT | 90 |
| 28265 | Her2.1.antisense Str2 (antisense) inverted | ACCCCAGCAGUUUCUGCAATT | 91 |
| 28266 | Her2.2.sense Str1 (sense) | GGUGCUUGGAUCUGGCGCUTT | 92 |
| 28267 | Her2.2.antisense Str2 (antisense) | AGCGCCAGAUCCAAGCACCTT | 93 |
| 28268 | Her2.2.sense Str1 (sense) inverted | UCGCGGUCUAGGUUCGUGGTT | 94 |
| 28269 | Her2.2.antisense Str2 (antisense) inverted | CCACGAACCUAGACCGCGATT | 95 |
| 28270 | Her2.3.sense Str1 (sense) | GAUCUUUGGGAGCCUGGCATT | 96 |
| 28271 | Her2.3.antisense Str2 (antisense) | UGCCAGGCUCCCAAAGAUCTT | 97 |
| 28272 | Her2.3.sense Str1 (sense) inverted | ACGGUCCGAGGGUUUCUAGTT | 98 |
| 28273 | Her2.3.antisense Str2 (antisense) inverted | CUAGAAACCCUCGGACCGUTT | 99 |
| 28274 | Sirna/RPI Inverted GL2 Str1 (sense) all ribo pyrimidines | AGCsUsUsCsAUsAAGGCsGCsAUsGC TT | 100 |
| | P = S | | |
| 28275 | Sirna/RPI Inverted GL2 Str1 (sense) 5 5′ P = S | AsGsCsUsUsCAUAAGGCGCAUGC TT | 101 |
| 28276 | Sirna/RPI Inverted GL2 Str2 (antisense) all ribo | GCsAUsGCsGCsCsUsUsAUsGAAGCsU TT | 102 |
| | pyrimidines P = S | | |
| 28277 | Sirna/RPI Inverted GL2 Str2 (antisense) 5 5′ P = S | GsCsAsUsGsCGCCUUAUGAAGCU TT | 103 |
| 28278 | Sirna/RPI Inverted GL2 Str2 (antisense) all ribo P = S | GsCsAsUsGsCsGsCsCsUsUsAsUsGsAsAsGsCsU TT | 104 |
| 28279 | Sirna/RPI Inverted GL2 Str2 (antisense) 14 5′ P = S | GsCsAsUsGsCsGsCsCsUsUsAsUsGsAAGCU TT | 105 |
| 28280 | Sirna/RPI Inverted GL2 Str2 (antisense) 10 5′ P = S | GsCsAsUsGsCsGsCsCsUsUAUGAAGCU TT | 106 |
| 28383 | hRelA.1.sense Str1 (sense) | CAGCACAGACCCAGCUGUGTT | 107 |
| 28384 | hRelA.1.antisense Str2 (antisense) | CACAGCUGGGUCUGUGCUGTT | 108 |
| 28385 | hRelA.1.sense Str1 (sense) inverted | GUGUCGACCCAGACACGACTT | 109 |
| 28386 | hRelA.1.antisense Str2 (antisense) inverted | GUCGUGUCUGGGUCGACACTT | 110 |
| 28387 | hRelA.2.sense Str1 (sense) | GCAGGCUGGAGGUAAGGCCTT | 111 |
| 28388 | hRelA.2.antisense Str2 (antisense) | GGCCUUACCUCCAGCCUGCTT | 112 |
| 28389 | hRelA.2.sense Str1 (sense) inverted | CCGGAAUGGAGGUCGGACGTT | 113 |
| 28390 | hRelA.2.antisense Str2 (antisense) inverted | CGUCCGACCUCCAUUCCGGTT | 114 |
| 28391 | h/mRelA.3.sense Str1 (sense) | GACUUCUCCUCCAUUGCGGTT | 115 |
| 28392 | h/mRelA.3.antisense Str2 (antisense) | CCGCAAUGGAGGAGAAGUCTT | 116 |
| 28393 | h/mRelA.3.sense Str1 (sense) inverted | GGCGUUACCUCCUCUUCAGTT | 117 |
| 28394 | h/mRelA.3.antisense Str2 (antisense) inverted | CUGAAGAGGAGGUAACGCCTT | 118 |
| 28395 | h/mRelA.4.sense Str1 (sense) | CACUGCCGAGCUCAAGAUCTT | 119 |
| 28396 | h/mRelA.4.antisense Str2 (antisense) | GAUCUUGAGCUCGGCAGUGTT | 120 |
| 28397 | h/mRelA.4.sense Str1 (sense) inverted | CUAGAACUCGAGCCGUCACTT | 121 |
| 28398 | h/mRelA.4.antisense Str2 (antisense) inverted | GUGACGGCUCGAGUUCUAGTT | 122 |
| 28399 | hIKKg.1.sense Str1 (sense) | GGAGUUCCUCAUGUGCAAGTT | 123 |
| 28400 | hIKKg.1.antisense Str2 (antisense) | CUUGCACAUGAGGAACUCCTT | 124 |
| 28401 | hIKKg.1.sense Str1 (sense) inverted | GAACGUGUACUCCUUGAGGTT | 125 |
| 28402 | hIKKg.1.antisense Str2 (antisense) inverted | CCUCAAGGAGUACACGUUCTT | 126 |
| 28403 | hIKKg.2.sense Str1 (sense) | UCAAGAGCUCCGAGAUGCCTT | 127 |
| 28404 | hIKKg.2.antisense Str2 (antisense) | GGCAUCUCGGAGCUCUUGATT | 128 |
| 28405 | hIKKg.2.sense Str1 (sense) inverted | CCGUAGAGCCUCGAGAACUTT | 129 |
| 28406 | hIKKg.2.antisense Str2 (antisense) inverted | AGUUCUCGAGGCUCUACGGTT | 130 |
| 28407 | h/mIKKG.sense Str1 (sense) | GCAGAUGGCUGAGGACAAGTT | 131 |
| 28408 | h/mIKKG.3.antisense Str2 (antisense) | CUUGUCCUCAGCCAUCUGCTT | 132 |
| 28409 | h/mIKKG.3.sense Str1 (sense) inverted | GAACAGGAGUCGGUAGACGTT | 133 |
| 28410 | h/mIKKG.3.antisense Str2 (antisense) inverted | CGUCUACCGACUCCUGUUCTT | 134 |
| 28447 | Sirna/RPI construct as hairpin + GAAA + AU blunt | AACGUACGCGGAAUACUUCGAUUAAAAGUAAUCGAAGUAUUCCGCGUACGUU | 135 |
| 28448 | Sirna/RPI construct as hairpin + GAAA + AU 3′ overhang | CGUACGCGGAAUACUUCGAUUAAAAGUAAUCGAAGUAUUCCGCGUACGUU | 136 |
| 28449 | Sirna/RPI construct as hairpin + GAAA blunt | AACGUACGCGGAAUACUUCGAUUAAAGAAUCGAAGUAUUCCGCGUACGUU | 137 |
| 28450 | Sirna/RPI construct as hairpin + GAAA 3′ overhang | CGUACGCGGAAUACUUCGAUUAAAGAAUCGAAGUAUUCCGCGUACGUU | 138 |
| 28451 | Sirna/RPI construct as hairpin + UUG 3′ overhang | CGUACGCGGAAUACUUCGAUUGUUAAUCGAAGUAUUCCGCGUACGUU | 139 |
| 28452 | Sirna/RPI construct as hairpin + UUG blunt | AACGUACGCGGAAUACUUCGAUUGUUAAUCGAAGUAUUCCGCGUACGUU | 140 |
| 28453 | Sirna/RPI construct as hairpin + UUG + AU blunt | AACGUACGCGGAAUACUUCGAUUAGUUUAAUCGAAGUAUUCCGCGUACGUU | 141 |
| 28454 | Sirna/RPI construct as hairpin + UUG 3′ overhang | CGUACGCGGAAUACUUCGAUUAGUUUAAUCGAAGUAUUCCGCGUACGUU | 142 |
| 28415 | HCV-Luc:325U21 TT siNA (sense) | CCCCGGGAGGUCUCGUAGATT | 143 |
| 28416 | HCV-Luc:162U21 TT siNA (sense) | CGGAACCGGUGAGUACACCTT | 144 |
| 28417 | HCV-Luc:324U21 TT siNA (sense) | GCCCCGGGAGGUCUCGUAGTT | 145 |
| 28418 | HCV-Luc:163U21 TT siNA (sense) | GGAACCGGUGAGUACACCGTT | 146 |
| 28419 | HCV-Luc:294U21 TT siNA (sense) | GUGGUACUGCCUGAUAGGGTT | 147 |
| 28420 | HCV-Luc:293U21 TT siNA (sense) | UGUGGUACUGCCUGAUAGGTT | 148 |
| 28421 | HCV-Luc:292U21 TT siNA (sense) | UUGUGGUACUGCCUGAUAGTT | 149 |
| 28422 | HCV-Luc:343L21 TT siNA (325C) (antisense) | UCUACGAGACCUCCCGGGGTT | 150 |
| 28423 | HCV-Luc:180L21 TT siNA (162C) (antisense) | GGUGUACUCACCGGUUCCGTT | 151 |
| 28424 | HCV-Luc:342L21 TT siNA (324C) (antisense) | CUACGAGACCUCCCGGGGCTT | 152 |
| 28425 | HCV-Luc:181L21 TT siNA (163C) (antisense) | CGGUGUACUCACCGGUUCCTT | 153 |
| 28426 | HCV-Luc:312L21 TT siNA (294C) (antisense) | CCCUAUCAGGCAGUACCACTT | 154 |
| 28427 | HCV-Luc:311L21 TT siNA (293C) (antisense) | CCUAUCAGGCAGUACCACATT | 155 |
| 28428 | HCV-Luc:310L21 TT siNA (292C) (antisense) | CUAUCAGGCAGUACCACAATT | 156 |
| 28429 | HCV-Luc:325U21 TT siNA (sense) inv | TTAGAUGCUCUGGAGGGCCCC | 157 |
| 28430 | HCV-Luc:162U21 TT siNA (sense) inv | TTCCACAUGAGUGGCCAAGGC | 158 |
| 28431 | HCV-Luc:324U21 TT siNA (sense) inv | TTGAUGCUCUGGAGGGCCCCG | 159 |
| 28432 | HCV-Luc:163U21 TT siNA (sense) inv | TTGCCACAUGAGUGGCCAAGG | 160 |
| 28433 | HCV-Luc:294U21 TT siNA (sense) inv | TTGGGAUAGUCCGUCAUGGUG | 161 |
| 28434 | HCV-Luc:293U21 TT siNA (sense) inv | TTGGAUAGUCCGUCAUGGUGU | 162 |
| 28435 | HCV-Luc:292U21 TT siNA (sense) inv | TTGAUAGUCCGUCAUGGUGUU | 163 |
| 28436 | HCV-Luc:343L21 TT siNA (325C) (antisense) inv | TTGGGGCCCUCCAGAGCAUCU | 164 |
| 28437 | HCV-Luc:180L21 TT siNA (162C) (antisense) inv | TTGCCUUGGCCACUCAUGUGG | 165 |
| 28438 | HCV-Luc:342L21 TT siNA (324C) (antisense) inv | TTCGGGGCCCUCCAGAGCAUC | 166 |
| 28439 | HCV-Luc:181L21 TT siNA (163C) (antisense) inv | TTCCUUGGCCACUCAUGUGGC | 167 |
| 28440 | HCV-Luc:312L21 TT siNA (294C) (antisense) inv | TTCACCAUGACGGACUAUCCC | 168 |
| 28441 | HCV-Luc:311L21 TT siNA (293C) (antisense) inv | TTACACCAUGACGGACUAUCC | 169 |
| 28442 | HCV-Luc:310L21 TT siNA (292C) (antisense) inv | TTAACACCAUGACGGACUAUC | 170 |
| 28458 | Sirna/RPI Inverted GL2 Str1 (sense) 5 5′ P = S + TsT | AsGsCsUsUsCAUAAGGCGCAUGC TsT | 171 |
| 28459 | Sirna/RPI Inverted GL2 Str2 (antisense) 5 5′ P = S + TsT | GsCsAsUsGsCGCCUUAUGAAGCU TsT | 172 |
| 28460 | Sirna/RPI GL2 Str1 (sense) 5 5′ P = S + TsT | CsGsUsAsCsGCGGAAUACUUCGA TsT | 173 |
| 28461 | Sirna/RPI GL2 Str2 (antisense) 5 5′ P = S + TsT | UsCsGsAsAsGUAUUCCGCGUACG TsT | 174 |
| 28511 | Sirna/RPI GL2 Str2 (antisense) + Sirna/RPI GL2 Str1 | CGUACGCGGAAUACUUCGATTBUCGAAGUAUUCCGCGUACG TT | 175 |
| | (sense) (tandem synth. w/ idB on 3′ of Str 1) | | |
| 29543 | HBV:248U21 siNA pos (sense) | GUCUAGACUCGUGGUGGACTT | 176 |
| 29544 | HBV:414U21 siNA pos (sense) | CCUGCUGCUAUGCCUCAUCTT | 177 |
| 29545 | HBV:1867U21 siNA pos (sense) | CAAGCCUCCAAGCUGUGCCTT | 178 |
| 29546 | HBV:1877U21 siNA pos (sense) | AGCUGUGCCUUGGGUGGCUTT | 179 |
| 29547 | HBV:228L21 siNA neg (248C) (antisense) | GUCCACCACGAGUCUAGACTT | 180 |
| 29548 | HBV:394L21 siNA neg (414C) (antisense) | GAUGAGGCAUAGCAGCAGGTT | 181 |
| 29549 | HBV:1847L21 siNA neg (1867C) (antisense) | GGCACAGCUUGGAGGCUUGTT | 182 |
| 29550 | HBV:1857L21 siNA neg (1877C) (antisense) | AGCCACCCAAGGCACAGCUTT | 183 |
| 29551 | HBV:248U21 siNA pos (sense) inv | CAGGUGGUGCUCAGAUCUGTT | 184 |
| 29552 | HBV:414U21 siNA pos (sense) inv | CUACUCCGUAUCGUCGUCCTT | 185 |
| 29553 | HBV:1867U21 siNA pos (sense) inv | CCGUGUCGAACCUCCGAACTT | 186 |
| 29554 | HBV:1877U21 siNA pos (sense) inv | UCGGUGGGUUCCGUGUCGATT | 187 |
| 29555 | HBV:228L21 siNA neg (248C) (antisense) inv | CAGAUCUGAGCACCACCUGTT | 188 |
| 29556 | HBV:394L21 siNA neg (414C) (antisense) inv | GGACGACGAUACGGAGUAGTT | 189 |
| 29557 | HBV:1847L21 siNA neg (1867C) (antisense) inv | GUUCGGAGGUUCGACACGGTT | 190 |
| 29558 | HBV:1857L21 siNA neg (1877C) (antisense) inv | UCGACACGGAACCCACCGATT | 191 |
| 29573 | HCV-Luc:162U21 siNA (sense) | CGGAACCGGUGAGUACACCGG | 192 |
| 29574 | HCV-Luc:163U21 siNA (sense) | GGAACCGGUGAGUACACCGGA | 193 |
| 29575 | HCV-Luc:292U21 siNA (sense) | UUGUGGUACUGCCUGAUAGGG | 194 |
| 29576 | HCV-Luc:293U21 siNA (sense) | UGUGGUACUGCCUGAUAGGGU | 195 |
| 29577 | HCV-Luc:294U21 siNA (sense) | GUGGUACUGCCUGAUAGGGUG | 196 |
| 29578 | HCV-Luc:324U21 siNA (sense) | GCCCCGGGAGGUCUCGUAGAC | 197 |
| 29579 | HCV-Luc:325U21 siNA (sense) | CCCCGGGAGGUCUCGUAGACC | 198 |
| 29580 | HCV-Luc:182L21 siNA (162C) (antisense) | GGUGUACUCACCGGUUCCGCA | 199 |
| 29581 | HCV-Luc:183L21 siNA (163C) (antisense) | CGGUGUACUCACCGGUUCCGC | 200 |
| 29582 | HCV-Luc:312L21 siNA (292C) (antisense) | CUAUCAGGCAGUACCACAAGG | 201 |
| 29583 | HCV-Luc:313L21 siNA (293C) (antisense) | CCUAUCAGGCAGUACCACAAG | 202 |
| 29584 | HCV-Luc:314L21 siNA (294C) (antisense) | CCCUAUCAGGCAGUACCACAA | 203 |
| 29585 | HCV-Luc:344L21 siNA (324C) (antisense) | CUACGAGACCUCCCGGGGCAC | 204 |
| 29586 | HCV-Luc:345L21 siNA (325C) (antisense) | UCUACGAGACCUCCCGGGGCA | 205 |
| 29587 | HCV-Luc:162U21 siNA (sense) rev | GGCCACAUGAGUGGCCAAGGC | 206 |
| 29588 | HCV-Luc:163U21 siNA (sense) rev | AGGCCACAUGAGUGGCCAAGG | 207 |
| 29589 | HCV-Luc:292U21 siNA (sense) rev | GGGAUAGUCCGUCAUGGUGUU | 208 |
| 29590 | HCV-Luc:293U21 siNA (sense) rev | UGGGAUAGUCCGUCAUGGUGU | 209 |
| 29591 | HCV-Luc:294U21 siNA (sense) rev | GUGGGAUAGUCCGUCAUGGUG | 210 |
| 29592 | HCV-Luc:324U21 siNA (sense) rev | CAGAUGCUCUGGAGGGCCCCG | 211 |
| 29593 | HCV-Luc:325U21 siNA (sense) rev | CCAGAUGCUCUGGAGGGCCCC | 212 |
| 29594 | HCV-Luc:182L21 siNA (162C) (antisense) rev | ACGCCUUGGCCACUCAUGUGG | 213 |
| 29595 | HCV-Luc:183L21 siNA (163C) (antisense) rev | CGCCUUGGCCACUCAUGUGGC | 214 |
| 29596 | HCV-Luc:312L21 siNA (292C) (antisense) rev | GGAACACCAUGACGGACUAUC | 215 |
| 29597 | HCV-Luc:313L21 siNA (293C) (antisense) rev | GAACACCAUGACGGACUAUCC | 216 |
| 29598 | HCV-Luc:314L21 siNA (294C) (antisense) rev | AACACCAUGACGGACUAUCCC | 217 |
| 29599 | HCV-Luc:344L21 siNA (324C) (antisense) rev | CACGGGGCCCUCCAGAGCAUC | 218 |
| 29600 | HCV-Luc:345L21 siNA (325C) (antisense) rev | ACGGGGCCCUCCAGAGCAUCU | 219 |
| 29601 | Luc2:128U21 siNA (sense) | CAGAUGCACAUAUCGAGGUGA | 220 |
| 29602 | Luc3:128U21 siNA (sense) | CAGAUGCACAUAUCGAGGUGG | 221 |
| 29603 | Luc2/3:128U21 TT siNA (sense) | CAGAUGCACAUAUCGAGGUTT | 222 |
| 29604 | Luc2/3:148L21 siNA (128C) (antisense) | ACCUCGAUAUGUGCAUCUGUA | 223 |
| 29605 | Luc2/3:148L21 TT siNA (128C) (antisense) | ACCUCGAUAUGUGCAUCUGTT | 224 |
| 29606 | Luc2/3:166U21 siNA (sense) | UACUUCGAAAUGUCCGUUCGG | 225 |
| 29607 | Luc2/3:166U21 TT siNA (sense) | UACUUCGAAAUGUCCGUUCTT | 226 |
| 29608 | Luc2:186L21 siNA (166C) (antisense) | GAACGGACAUUUCGAAGUAUU | 227 |
| 29609 | Luc3:186L21 siNA (166C) (antisense) | GAACGGACAUUUCGAAGUACU | 228 |
| 29610 | Luc2/3:186L21 TT siNA (166C) (antisense) | GAACGGACAUUUCGAAGUATT | 229 |
| 29611 | Luc2/3:167U21 siNA (sense) | ACUUCGAAAUGUCCGUUCGGU | 230 |
| 29612 | Luc2/3:167U21 TT siNA (sense) | ACUUCGAAAUGUCCGUUCGTT | 231 |
| 29613 | Luc2:187L21 siNA (167C) (antisense) | CGAACGGACAUUUCGAAGUAU | 232 |
| 29614 | Luc3:187L21 siNA (167C) (antisense) | CGAACGGACAUUUCGAAGUAC | 233 |
| 29615 | Luc2/3:187L21 TT siNA (167C) (antisense) | CGAACGGACAUUUCGAAGUTT | 234 |
| 29616 | Luc2/3:652U21 siNA (sense) | AGAUUCUCGCAUGCCAGAGAU | 235 |
| 29617 | Luc2/3:652U21 TT siNA (sense) | AGAUUCUCGCAUGCCAGAGTT | 236 |
| 29618 | Luc2:672L21 siNA (652C) (antisense) | CUCUGGCAUGCGAGAAUCUGA | 237 |
| 29619 | Luc3:672L21 siNA (652C) (antisense) | CUCUGGCAUGCGAGAAUCUCA | 238 |
| 29620 | Luc2/3:672L21 TT siNA (652C) (antisense) | CUCUGGCAUGCGAGAAUCUTT | 239 |
| 29621 | Luc2/3:653U21 siNA (sense) | GAUUCUCGCAUGCCAGAGAUC | 240 |
| 29622 | Luc2/3:653U21 TT siNA (sense) | GAUUCUCGCAUGCCAGAGATT | 241 |
| 29623 | Luc2:673L21 siNA (653C) (antisense) | UCUCUGGCAUGCGAGAAUCUG | 242 |
| 29624 | Luc3:673L21 siNA (653C) (antisense) | UCUCUGGCAUGCGAGAAUCUC | 243 |
| 29625 | Luc2/3:673L21 TT siNA (653C) (antisense) | UCUCUGGCAUGCGAGAAUCTT | 244 |
| 29626 | Luc2/3:880U21 siNA (sense) | UUCUUCGCCAAAAGCACUCUG | 245 |
| 29627 | Luc2/3:880U21 TT siNA (sense) | UUCUUCGCCAAAAGCACUCTT | 246 |
| 29628 | Luc2:900L21 siNA (880C) (antisense) | GAGUGCUUUUGGCGAAGAAUG | 247 |
| 29629 | Luc3:900L21 siNA (880C) (antisense) | GAGUGCUUUUGGCGAAGAAGG | 248 |
| 29630 | Luc2/3:900L21 TT siNA (880C) (antisense) | GAGUGCUUUUGGCGAAGAATT | 249 |
| 29631 | Luc2/3:1012U21 siNA (sense) | CAAGGAUAUGGGCUCACUGAG | 250 |
| 29632 | Luc2/3:1012U21 TT siNA (sense) | CAAGGAUAUGGGCUCACUGTT | 251 |
| 29633 | Luc2:1032L21 siNA (1012C) (antisense) | CAGUGAGCCCAUAUCCUUGUC | 252 |
| 29634 | Luc3:1032L21 siNA (1012C) (antisense) | CAGUGAGCCCAUAUCCUUGCC | 253 |
| 29635 | Luc2/3:1032L21 TT siNA (1012C) (antisense) | CAGUGAGCCCAUAUCCUUGTT | 254 |
| 29636 | Luc2:1139U21 siNA (sense) | AAACGCUGGGCGUUAAUCAGA | 255 |
| 29637 | Luc3:1139U21 siNA (sense) | AAACGCUGGGCGUUAAUCAAA | 256 |
| 29638 | Luc2/3:1139U21 TT siNA (sense) | AAACGCUGGGCGUUAAUCATT | 257 |
| 29639 | Luc2/3:1159L21 siNA (1139C) (antisense) | UGAUUAACGCCCAGCGUUUUC | 258 |
| 29640 | Luc2/3:1159L21 TT siNA (1139C) (antisense) | UGAUUAACGCCCAGCGUUUTT | 259 |
| 29641 | Luc2:1283U21 siNA (sense) | AAGACGAACACUUCUUCAUAG | 260 |
| 29642 | Luc3:1283U21 siNA (sense) | AAGACGAACACUUCUUCAUCG | 261 |
| 29643 | Luc2/3:1283U21 TT siNA (sense) | AAGACGAACACUUCUUCAUTT | 262 |
| 29644 | Luc2/3:1303L21 siNA (1283C) (antisense) | AUGAAGAAGUGUUCGUCUUCG | 263 |
| 29645 | Luc2/3:1303L21 TT siNA (1283C) (antisense) | AUGAAGAAGUGUUCGUCUUTT | 264 |
| 29646 | Luc2:1487U21 siNA (sense) | AAGAGAUCGUGGAUUACGUGG | 265 |
| 29647 | Luc3:1487U21 siNA (sense) | AAGAGAUCGUGGAUUACGUCG | 266 |
| 29648 | Luc2/3:1487U21 TT siNA (sense) | AAGAGAUCGUGGAUUACGUTT | 267 |
| 29649 | Luc2/3:1507L21 siNA (1487C) (antisense) | ACGUAAUCCACGAUCUCUUUU | 268 |
| 29650 | Luc2/3:1507L21 TT siNA (1487C) (antisense) | ACGUAAUCCACGAUCUCUUTT | 269 |
| 29651 | Luc2:1622U21 siNA (sense) | AGGCCAAGAAGGGCGGAAAGU | 270 |
| 29652 | Luc3:1622U21 siNA (sense) | AGGCCAAGAAGGGCGGAAAGA | 271 |
| 29653 | Luc2/3:1622U21 TT siNA (sense) | AGGCCAAGAAGGGCGGAAATT | 272 |
| 29654 | Luc2/3:1642L21 siNA (1622C) (antisense) | UUUCCGCCCUUCUUGGCCUUU | 273 |
| 29655 | Luc2/3:1642L21 TT siNA (1622C) (antisense) | UUUCCGCCCUUCUUGGCCUTT | 274 |
| 29656 | Luc2:1623U21 siNA (sense) | GGCCAAGAAGGGCGGAAAGUC | 275 |
| 29657 | Luc3:1623U21 siNA (sense) | GGCCAAGAAGGGCGGAAAGAU | 276 |
| 29658 | Luc2/3:1623U21 TT siNA (sense) | GGCCAAGAAGGGCGGAAAGTT | 277 |
| 29659 | Luc2/3:1643L21 siNA (1623C) (antisense) | CUUUCCGCCCUUCUUGGCCUU | 278 |
| 29660 | Luc2/3:1643L21 TT siNA (1623C) (antisense) | CUUUCCGCCCUUCUUGGCCTT | 279 |
| 29663 | Sirna/RPI GL2 Str2 (antisense), all pyrimidines + 5BrdUT = | UsCsGAAGUsAUsUsCsCsGCsGUsACsGUsT | 280 |
| | PS | | |
| 29664 | Sirna/RPI GL2 Str1 (sense) all pyrimidines + 5-BrdUT = PS | CsGUsACsGCsGGAAUsACsUsUsCsGAUsT | 281 |
| 29665 | Sirna/RPI GL2 Str1 (sense) 5 5′ + 5-BrdUT = P = S | CsGsUsAsCsGCGGAAUACUUCGA UsT | 282 |
| 29666 | Sirna/RPI GL2 Str2 (antisense) 5′ 5 + 5BrdUT = P = S | UsCsGsAsAsGUAUUCCGCGUACG UsT | 283 |
| 29667 | Sirna/RPI GL2 Str1 (sense) all pyrimidines + TT = | CsGUsACsGCsGGAAUsACsUsUsCsGATsTB | 284 |
| | PS + 3′invAba | | |
| 29668 | Sirna/RPI GL2 Str1 (sense) all pyrimidines = PS + 3′ and 5′ | BCsGUsACsGCsGGAAUsACsUsUsCsGATsTB | 285 |
| | nvAba | | |
| 29669 | Sirna/RPI GL2 Str1 (sense) all pyrimidines + TT = PS + 5′ | BCsGUsACsGCsGGAAUsACsUsUsCsGATsT | 286 |
| | invAba | | |
| 29670 | Sirna/RPI GL2 Str2 (antisense), all pyrimidines + TT = PS + | UsCsGAAGUsAUsUsCsCsGCsGUsACsGTsTB | 287 |
| | 3′inverted abasic | | |
| 29671 | Sirna/RPI GL2 Str2 (antisense), all pyrimidines + TT = PS + | BUsCsGAAGUsAUsUsCsCsGCsGUsACsGTsTB | 288 |
| | 3′and 5′ inverted abasic | | |
| 29672 | Sirna/RPI GL2 Str2 (antisense), all pyrimidines + TT = PS + | BUsCsGAAGUsAUsUsCsCsGCsGUsACsGTsT | 289 |
| | 5′ inverted abasic | | |
| 29678 | Sirna/RPI GL2 Str1 (sense) +′Sirna/RPI GL2 Str2 | UCGAAGUAUUCCGCGUACG TTBCGUACGCGGAAUACUUCGATT | 290 |
| | (antisense) (tandem synth. w/ idB on 3′ of Str 2) | | |
| 29681 | Sirna/RPI GL2 Str1 (sense) 5′ligation fragment 5-5′-P = S | CsGsUsAsCsG | 291 |
| 29682 | Sirna/RPI GL2 Str1 (sense) 3′-ligation fragment 5-5′-P = S | CGGAAUACUUCGATsT | 292 |
| 29683 | Sirna/RPI GL2 Str2 (antisense) 5′ ligation fragment | UsCsGsAsAsGUA | 293 |
| | 5-5′-P = S | | |
| 29684 | Sirna/RPI GL2 Str2 (antisense) 3′ ligation fragment | UUCCGCGUACGTsT | 294 |
| | 5-5′-P = S | | |
| 29685 | Sirna/RPI GL2 Str2 (antisense) 5′ ligation fragment all-P = S | UsCsGsAsAsGsUsA | 295 |
| 29686 | Sirna/RPI GL2 Str2 (antisense) 3′ ligation fragment all-P = S | UsUsCsCsGsCsGsUsAsCsGsTsT | 296 |
| 29694 | FLT1:349U21 siNA stab1 (sense) | CsUsGsAsGsUUUAAAAGGCACCCTsT | 297 |
| 29695 | FLT1:2340U21 siNA stab1 (sense) | CsAsAsCsCsACAAAAUACAACAATsT | 298 |
| 29696 | FLT1:3912U21 siNA stab1 (sense) | CsCsUsGsGsAAAGAAUCAAAACCTsT | 299 |
| 29697 | FLT1:2949U21 siNA stab1 (sense) | GsCsAsAsGsGAGGGCCUCUGAUGTsT | 300 |
| 29698 | FLT1:369L21 siNA (349C) stab1 (antisense) | GsGsGsUsGsCCUUUUAAACUCAGTsT | 301 |
| 29699 | FLT1:2360L21 siNA (2340C) stab1 (antisense) | UsUsGsUsUsGUAUUUUGUGGUUGTsT | 302 |
| 29700 | FLT1:3932L21 siNA (3912C) stab1 (antisense) | GsGsUsUsUsUGAUUCUUUCCAGGTsT | 303 |
| 29701 | FLT1:2969L21 siNA (2949C) stab1 (antisense) | CsAsUsCsAsGAGGCCCUCCUUGCTsT | 304 |
| 29706 | FLT1:369L21 siNA (349C) (antisense) stab2 | GsGsGsUsGsCsCsUsUsUsUsAsAsAsCsUsCsAsGsTsT | 305 |
| 29707 | FLT1:2360L21 siNA (2340C) (antisense) stab2 | UsUsGsUsUsGsUsAsUsUsUsUsGsUsGsGsUsUsGsTsT | 306 |
| 29708 | FLT1:3932L21 siNA (3912C) (antisense) stab2 | GsGsUsUsUsUsGsAsUsUsCsUsUsUsCsCsAsGsGsTsT | 307 |
| 29709 | FLT1:2969L21 siNA (2949C) (antisense) stab2 | CsAsUsCsAsGsAsGsGsCsCsCsUsCsCsUsUsGsCsTsT | 308 |
| 28030 | Sirna/RPI GL2 Str1 (sense) | ggcauuggccaacguacgcggaauacuucgauucgguuacgaa | 309 |
| 28242 | Sirna/RPI GL2 Str1 (sense) 2′-OMe | cguacgcggaauacuucgauu | 310 |
| 28243 | Sirna/RPI GL2 Str1 (sense) 14 5′ 2′-O-Me | cguacgcggaauacUUCGATT | 311 |
| 28244 | Sirna/RPI GL2 Str1 (sense) 10 5′ 2′-O-Me | cguacgcggaAUACUUCGATT | 312 |
| 28245 | Sirna/RPI GL2 Str1 (sense) 5 5′ 2′-O-Me | cguacGCGGAAUACUUCGATT | 313 |
| 28246 | Sirna/RPI GL2 Str2 (antisense) all 2′-O-me | ucgaaguauuccgcguacguu | 314 |
| 28247 | Sirna/RPI GL2 Str2 (antisense) all ribo pyrimidines = | ucGAAGuAuuccGcGuAcGuu | 315 |
| | 2′-Ome | | |
| 28248 | Sirna/RPI GL2 Str2 (antisense) 5′ 14 2′-O-Me | ucgaaguauuccgcGUACGTT | 316 |
| 28249 | Sirna/RPI GL2 Str2 (antisense) 5′ 10 2′-O-Me | ucgaaguauuCCGCGUACGTT | 317 |
| 28250 | Sirna/RPI GL2 Str2 (antisense) 5′ 2′-O-Me | ucgaaGUAUUCCGCGUACGTT | 318 |
| 28251 | Sirna/RPI GL2 Str1 (sense) all pyrimidines 2′-O-Me | cGuAcGcGGAAuAcuucGATT | 319 |
| | except 3′-TT | | |
| 28252 | Sirna/RPI GL2 Str1 (sense) all pyrimidines = 2′-OMe | cGuAcGcGGAAuAcuucGAuu | 320 |
| 28253 | Sirna/RPI GL2 Str1 (sense) + TT = P = S | CGUACGCGGAAUACUUCGATsT | 321 |
| 28261 | Sirna/RPI GL2 Str2 (antisense) all ribo pyrimidines = | ucGAAGuAuuccGcGuAcGTT | 322 |
| | 2′-O-me,except 3′-TT | | |
| 28257 | Sirna/RPI GL2 Str1 (sense) + 3′ univ. base 2 | CGUACGCGGAAUACUUCGAXX | 323 |
| 28258 | Sirna/RPI GL2 Str1 (sense) + 3′ univ base 1 | CGUACGCGGAAUACUUCGAZZ | 324 |
| 28259 | Sirna/RPI GL2 Str2 (antisense), + 3′ univ. base 2 | UCGAAGUAUUCCGCGUACGXX | 325 |
| 28260 | Sirna/RPI GL2 Str2 (antisense), + 3′ univ. base 1 | UCGAAGUAUUCCGCGUACGZZ | 326 |
| 28014 | Sirna/RPI GL2 Str1 (sense) 5′ligation fragment P = Scapped | csGsusAscG | 327 |
| | Y-2′F | | |
| 28015 | Sirna/RPI GL2 Str1 (sense) 3′ ligation fragment | cGGAAuAcuucsGsAsTsT | 328 |
| | P = Scapped Y-2′F | | |
| 28026 | Sirna/RPI GL2 Str1 (sense)P = Scapped Y-2′F | csGsusAscGcGGAAuAcuucsGsAsTsT | 329 |
| 28016 | Sirna/RPI GL2 Str2 (antisense) 5′ ligation fragment | uscsGsAsAGuA | 330 |
| | P = Scapped Y-2′F | | |
| 28017 | Sirna/RPI GL2 Str2 (antisense) 3′ligation fragment | uuccGCGuAscsGsTsT | 331 |
| | P = Scapped Y-2′F | | |
| 28027 | Sirna/RPI GL2 Str2 (antisense) P = Scapped Y-2′F | uscsGsAsAGuAuuccGCGuAscsGsTsT | 332 |
| 28018 | Sirna/RPI GL2 Str1 (sense) 5′ligation fragment 5′P = S | scGuAcG | 333 |
| | Y-2′F | | |
| 28019 | Sirna/RPI GL2 Str1 (sense) 3′ ligation fragment 5′P = S | cGGAAuAcuucGATT | 334 |
| | Y-2′F | | |
| 28028 | Sirna/RPI GL2 Str1 (sense)5′P = S Y-2′F | scGuAcGcGGAAuAcuucGATT | 335 |
| 28020 | Sirna/RPI G12 Str2 (antisense) 5′ ligation fragment 5′P = S | sucGAAGuA | 336 |
| | Y-2′F | | |
| 28021 | Sirna/RPI GL2 Str2 (antisense) 3′ligation fragment 5′P = S | uuccGCGuAcGTT | 337 |
| | Y-2′F | | |
| 28029 | Sirna/RPI GL2 Str2 (antisense) 5′P = S Y-2′F | sucGAAGuAuuccGCGuAcGTT | 338 |
| 28022 | Sirna/RPI Inverted GL2 Str1 (sense) P = Scapped Y-2′F | AsGscsusucAuAAGGcGcAusGscsTsT | 339 |
| 28023 | Sirna/RPI Inverted GL2 Str2 (antisense) P = Scapped Y-2′F | GscsAsusGcGccuuAuGAAGscsusTsT | 340 |
| 28024 | Sirna/RPI Inverted GL2 Str1 (sense) 5′P = S Y-2′F | sAGcuucAuAAGGcGcAuGcTT | 341 |
| 28025 | Sirna/RPI Inverted GL2 Str2 (antisense) 5′P = S Y-2′F | sGcAuGcGccuuAuGAAGcuTT | 342 |
| 28455 | Sirna/RPI GL2 Str1 (sense) 2′-F U C | cGuAcGcGGAAuAcuucGATT | 343 |
| 28456 | Sirna/RPI GL2 Str2 (antisense) 2′-F U C | ucGAAGuAuuccGcGuAcGTT | 344 |
| 29702 | FLT1:349U21 siNA stab3 (sense) | csusGsAsGuuuAAAAGGcAcscscsTsT | 345 |
| 29703 | FLT1:2340U21 siNA stab3 (sense) | csAsAscscAcAAAAuAcAAcsAsAsTsT | 346 |
| 29704 | FLT1:3912U21 siNA stab3 (sense) | cscsusGsGAAAGAAucAAAAscscsTsT | 347 |
| 29705 | FLT1:2949U21 siNA stab3 (sense) | GscsAsAsGGAGGGccucuGAsusGsTsT | 348 |
| 28443 | Sirna/RPI GL2 Str1 (sense) 2′-amino U C | cGuAcGcGGAAuAcuucGATT | 349 |
| 28444 | Sirna/RPI GL2 Str2 (antisense) 2′-amino U C | ucGAAGuAuuccGcGuAcGTT | 350 |
| 28445 | Sirna/RPI GL2 Str1 (sense) 2′-amino U C uT 3′end | cGuAcGcGGAAuAcuucGAuT | 351 |
| 28446 | Sirna/RPI GL2 Str2 (antisense) 2′-amino U C uT 3′end | ucGAAGuAuuccGcGuAcGuT | 352 |
| 30051 | HCV-Luc:325U21 siNA 5 5′ P = S + 3′ univ. base 2 + 5′/3′ | BCsCsCsCsGsGGAGGUCUCGUAGAXXB | 353 |
| | invAba (antisense) | | |
| 30052 | HCV-Luc:325U21 siNA rev 5 5′ P = S + 3′ univ. base 2 + | BAsGsAsUsGsCUCUGGAGGGCCCCXXB | 354 |
| | 5′/3′ invAba (antisense) | | |
| 30053 | HCV-Luc:345L21 siNA (325C) (antisense) 5 5′ P = S + 3′ | UsCsUsAsCsGAGACCUCCCGGGGXXB | 355 |
| | univ. base 2 + 3′ invAba (sense) | | |
| 30054 | HCV-Luc:345L21 siNA (325C) (antisense) rev 5 5′ P = S + 3′ | GsGsGsGsCsCCUCCAGAGCAUCUXXB | 356 |
| | univ. base 2 + 3′ invAba (sense) | | |
| 30055 | HCV-Luc:325U21 siNA all Y P = S + 3′ univ. base 2 + 5′/3′ | BCsCsCsCsGGGAGGUsCsUsCsGUsAGAXXB | 357 |
| | invAba (antisense) | | |
| 30056 | HCV-Luc:325U21 siNA rev all Y P = S + 3′ univ. base 2 + | BAGAUsGCsUsCsUsGGAGGGCsCsCsCsXXB | 358 |
| | 5′/3′ invAba (antisense) | | |
| 30057 | HCV-Luc:345L21 siNA (325C) (antisense) all Y P = S + 3′ | UsCsUsACsGAGACsCsUsCsCsCsGGGGXXB | 359 |
| | univ. base 2 + 3′ invAba (sense) | | |
| 30058 | HCV-Luc:345L21 siNA (325C) (antisense) rev all Y P = S + | GGGGCsCsCsUsCsCsAGAGCsAUsCsUsXXB | 360 |
| | 3′ univ. base 2 + 3′ invAba (sense) | | |
| 30059 | HCV-Luc:325U21 siNA 4/3 P = S ends + all Y-2′F + 3′ univ. | BcscscscsGGGAGGucucGuAsGsAsXXB | 361 |
| | base 2 + 5′/3′ invAba (antisense) | | |
| 30060 | HCV-Luc:325U21 siNA rev 4/3 P = S ends + all Y-2′F + 3′ | BAsGsAsusGcucuGGAGGGccscscsXXB | 362 |
| | univ. base 2 + 5′/3′ invAba (antisense) | | |
| 30170 | HCV-Luc:325U21 siNA all Y-2′F + 3′ univ. base 2 + 5′/3′ | B ccccGGGAGGucucGuAGAXX B | 363 |
| | invAba (antisense) | | |
| 30171 | HCV-Luc:325U21 siNA rev all Y-2′F + 3′ univ. base 2 + 5′/3′ | B AGAuGcucuGGAGGGccccXX B | 364 |
| | invAba (antisense) | | |
| 30172 | HCV-Luc:345L21 siNA (325C) (antisense) all Y P = S + 3′ | B UsCsUsACsGAGACsCsUsCsCsCsGGGGXX B | 365 |
| | univ. base 2 + 5′/3′ invAba (antisense) | | |
| 30173 | HCV-Luc:345L21 siNA (325C) (antisense) all Y-2′F | ucuAcGAGAccucccGGGG | 366 |
| 30174 | HCV-Luc:345L21 siNA (325C) (antisense) rev all Y-2′F | GGGGcccuccAGAGcAucu | 367 |
| 30175 | HCV-Luc:345L21 siNA (325C) (antisense) all Y-2′F + 3′ | ucuAcGAGAccucccGGGGXX | 368 |
| | univ. base 2 | | |
| 30176 | HCV-Luc:345L21 siNA (325C) (antisense) rev all Y-2′F + 3′ | GGGGcccuccAGAGcAucuXX | 369 |
| | univ. base 2 | | |
| 30177 | HCV-Luc:345L21 siNA (325C) (antisense) all Y-2′F + 3′ | B ucuAcGAGAccucccGGGGXX B | 370 |
| | univ. base 2 + 5′/3′ iB | | |
| 30178 | HCV-Luc:325U21 siNA all Y P = S + 3′ univ. base 2 + 3′ | CsCsCsCsGGGAGGUsCsUsCsGUsAGAXX B | 371 |
| | invAba (sense) | | |
| 30063 | Sirna/RPI GL2 Str1 (sense) 2′-F U,C + 3′,5′ abasic | BcGuAcGcGGAAuAcuucGATTB | 372 |
| 30222 | Sirna/RPI GL2 Str1 (sense) Y 2′-O-Me with 3′-TT & 5′/3′ iB | B cGuAcGcGGAAuAcuucGATT B | 373 |
| 30224 | Sirna/RPI GL2 Str2 (antisense) Y 2′-F & 3′ TsT | ucGAAGuAuuccGcGuAcGTsT | 374 |
| 30430 | Sirna/RPI GL2 Str2 (antisense) 2′-F U,C + 5′,3′ abasic, | ucgaaguauuccgcguacgTsT | 375 |
| | A,G = 2′-O-Me | | |
| 30431 | Sirna/RPI GL2 Str1 (sense) 2′-F U,C + 3′,5′ abasic,TT; | BcguacgcggaauacuucgaTTB | 376 |
| | 2′-O-Me-A,G | | |
| 30433 | Sirna/RPI GL2 Str1 (sense) 2′-F U,C + 3′,5′ abasic,TT; | BcGuAcGcGGAAuAcuucGATTB | 377 |
| | 2′-deoxy-A,G | | |
| 30550 | Sirna/RPI GL2 Str2 (antisense) 2′-F U,C 3′-dTsT | ucGAAGuAuuccGcGuAcGTst | 378 |
| 30555 | Sirna/RPI GL2 Str2 (antisense) 2′-F U,C 3′-glycerol.T | ucGAAGuAuuccGcGuAcGTL | 379 |
| 30556 | Sirna/RPI GL2 Str2 (antisense) 2′-F U,C 3′-glycerol,2T | ucGAAGuAuuccGcGuAcGTTL | 380 |
| 30226 | rev Sirna/RPI GL2 Str1 (sense) Y 2′-O-Me with 3′-TT & | B AGcuucAuAAGGcGcAuGcTT B | 381 |
| | 5′/3′ iB | | |
| 30227 | rev Sirna/RPI GL2 Str1 (sense) Y 2′-F with 3′-TT & 5′/3′ iB | B AGcuucAuAAGGcGcAuGcTT B | 382 |
| 30229 | rev Sirna/RPI GL2 Str2 (antisense) Y 2′-F & 3′ TsT | GcAuGcGccuuAuGAAGcuTsT | 383 |
| 30434 | Sirna/RPI GL2 Str1 (sense) 2′-F U,C + 3′,5′ Abasic,TT; | BcguacgcGGAAuAcuucgaTTB | 384 |
| | 2′-O-Me-A,G; ribo core | | |
| 30435 | Sirna/RPI GL2 Str1 (sense) 2′-F U,C + 3′,5′ Abasic,TT; | BcGuAcGcGGAAuAcuucGATTB | 385 |
| | 2′-deoxyA,G; ribo core | | |
| 30546 | Sirna/RPI GL2 Str2 (antisense) 2′-F U,C 3′-dTT | ucGAAGuAuuccGcGuAcG3T | 386 |
| 30551 | Sirna/RPI GL2 Str2 (antisense) 2′-F U,C dTddC | ucGAAGuAuuccGcGuAcGTddC | 387 |
| 30557 | Sirna/RPI GL2 Str2 (antisense) 2′-F U,C 3′-invertedT,T | ucGAAGuAuuccGcGuAcGT | 388 |
| 30558 | Sirna/RPI GL2 Str2 (antisense) 2′-F U,C 3′-invertedT,TT | ucGAAGuAuuccGcGuAcGTT | 389 |
| 30196 | FLT1:2340U21 siRNA sense iB caps w/2′FY's | B cAAccAcAAAAuAcAAcAATT B | 390 |
| 30416 | FLT1:2358L21 siRNA (2340C) (antisense) TsT | uuGuuGuAuuuuGuGGuuGTsT | 391 |
| 30350 | HBV:262U21 siRNA stab04 (sense) | B uGGAcuucucucAAuuuucuA B | 392 |
| 30361 | HBV:280L21 siRNA (262C) (antisense) stab05 | GAAAAuuGAGAGAAGuccATsT | 393 |
| 30372 | HBV:262U21 siRNA inv stab04 (sense) | B AucuuuuAAcucucuucAGGu B | 394 |
| 30383 | HBV:280L21 siRNA (262C) (antisense) inv stab05 | AccuGAAGAGAGuuAAAAGTsT | 395 |
| 30352 | HBV:380U21 siRNA stab04 (sense) | B uGuGucuGcGGcGuuuuAucA B | 396 |
| 30363 | HBV:398L21 siRNA (380C) (antisense) stab05 | AuAAAAcGccGcAGAcAcATsT | 397 |
| 30374 | HBV:380U21 siRNA inv stab04 (sense) | B AcuAuuuuGcGGcGucuGuGu B | 398 |
| 30385 | HBV:398L21 siRNA (380C) (antisense) inv stab05 | AcAcAGAcGccGcAAAAuATsT | 399 |
| 30353 | HBV:413U21 siRNA stab04 (sense) | B uccuGcuGcuAuGccucAucu B | 400 |
| 30364 | HBV:431L21 siRNA (413C) (antisense) stab05 | AuGAGGcAuAGcAGcAGGATsT | 401 |
| 30375 | HBV:413U21 siRNA inv stab04 (sense) | B ucuAcuccGuAucGucGuccu B | 402 |
| 30386 | HBV:431L21 siRNA (413C) (antisense) inv stab05 | AGGAcGAcGAuAcGGAGuATsT | 403 |
| 30354 | HBV:462U21 siRNA stab04 (sense) | B uAuGuuGcccGuuuGuccucu B | 404 |
| 30365 | HBV:480L21 siRNA (462C) (antisense) stab05 | AGGAcAAAcGGGcAAcAuATsT | 405 |
| 30376 | HBV:462U21 siRNA inv stab04 (sense) | B ucuccuGuuuGcccGuuGuAu B | 406 |
| 30387 | HBV:480L21 siRNA (462C) (antisense) inv stab05 | AuAcAAcGGGcAAAcAGGATsT | 407 |
| 30355 | HBV:1580U21 siRNA stab04 (sense) | B uGuGcAcuucGcuucAccucu B | 408 |
| 30366 | HBV:1598L21 siRNA (1580C) (antisense) stab05 | AGGuGAAGcGAAGuGcAcATsT | 409 |
| 30377 | HBV:1580U21 siRNA inv stab04 (sense) | B ucuccAcuucGcuucAcGuGu B | 410 |
| 30388 | HBV:1598L21 siRNA (1580C) (antisense) inv stab05 | AcAcGuGAAGcGAAGuGGATsT | 411 |
| 30356 | HBV:1586U21 siRNA stab04 (sense) | B cuucGcuucAccucuGcAcGu B | 412 |
| 30367 | HBV:1604L21 siRNA (1586C) (antisense) stab05 | GuGcAGAGGuGAAGcGAAGTsT | 413 |
| 30378 | HBV:1586U21 siRNA inv stab04 (sense) | B uGcAcGucuccAcuucGcuuc B | 414 |
| 30389 | HBV:1604L21 siRNA (1586C) (antisense) inv stab05 | GAAGcGAAGuGGAGAcGuGTsT | 415 |
| 30357 | HBV:1780U21 siRNA stab04 (sense) | B AGGcuGuAGGcAuAAAuuGGu B | 416 |
| 30368 | HBV:1798L21 siRNA (1780C) (antisense) stab05 | cAAuuuAuGccuAcAGccuTsT | 417 |
| 30379 | HBV:1780U21 siRNA inv stab04 (sense) | B uGGuuAAAuAcGGAuGucGGA B | 418 |
| 30390 | HBV:1798L21 siRNA (1780C) (antisense) inv stab05 | uccGAcAuccGuAuuuAAcTsT | 419 |
| 30612 | HBV:1580U21 siRNA stab07 (sense) | B uGuGcAcuucGcuucAccuTT B | 420 |
| 30620 | HBV:1598L21 siRNA (1580C) (antisense) stab08 | aggugaagcgaagugcacaTsT | 421 |
| 30628 | HBV:1582U21 siRNA inv stab07 (sense) | B ucuccAcuucGcuucAcGuTT B | 422 |
| 30636 | HBV:1596L21 siRNA (1578C) (antisense) inv stab08 | gcacacgugaagcgaagugTsT | 423 |
| 31175 | HBV:1598L21 siRNA (1580C) stab11 (antisense) | AGGuGAAGcGAAGuGcAcATsT | 424 |
| 31176 | HBV:1596L21 siRNA (1578C) (antisense) inv stab11 | GcAcAcGuGAAGcGAAGuGTsT | 425 |
| | (antisense) | | |
| 30287 | HBV:1580U21 siRNA (sense) | UGUGCACUUCGCUUCACCUCU | 426 |
| 30298 | HBV:1598L21 siRNA (1580C) (antisense) | AGGUGAAGCGAAGUGCACACG | 427 |
| 31335 | HBV:1580U21 siRNA stab09 (sense) | B UGUGCACUUCGCUUCACCUTT B | 428 |
| 31337 | HBV:1598L21 siRNA (1580C) stab10 (antisense) | AGGUGAAGCGAAGUGCACATsT | 429 |
| 31456 | HCVa:291U21 siRNA stab04 (sense) | B cuuGuGGuAcuGccuGAuATT B | 430 |
| 31468 | HCVa:309L21 siRNA (291C) stab05 (antisense) | uAucAGGcAGuAccAcAAGTsT | 431 |
| 31480 | HCVa:291U21 siRNA inv stab04 (sense) | B AuAGuccGucAuGGuGuucTT B | 432 |
| 31492 | HCVa:309L21 siRNA (291C) inv stab05 (antisense) | GAAcAccAuGAcGGAcuAuTsT | 433 |
| 31461 | HCVa:300U21 siRNA stab04 (sense) | B cuGccuGAuAGGGuGcuuGTT B | 434 |
| 31473 | HCVa:318L21 siRNA (300C) stab05 (antisense) | cAAGcAcccuAucAGGcAGTsT | 435 |
| 31485 | HCVa:300U21 siRNA inv stab04 (sense) | B GuucGuGGGAuAGuccGucTT B | 436 |
| 31497 | HCVa:318L21 siRNA (300C) inv stab05 (antisense) | GAcGGAcuAucccAcGAAcTsT | 437 |
| 31463 | HCVa:303U21 siRNA stab04 (sense) | B ccuGAuAGGGuGcuuGcGATT B | 438 |
| 31475 | HCVa:321L21 siRNA (303C) stab05 (antisense) | ucGcAAGcAcccuAucAGGTsT | 439 |
| 31487 | HCVa:303U21 siRNA inv stab04 (sense) | B AGcGuucGuGGGAuAGuccTT B | 440 |
| 31499 | HCVa:321L21 siRNA (303C) inv stab05 (antisense) | GGAcuAucccAcGAAcGcuTsT | 441 |
| 31344 | HCVa:325U21 siRNA stab07 (sense) | B ccccGGGAGGucucGuAGATT B | 442 |
| 30562 | HCVa:345L21 siRNA (325C) Y-2′F, R-2′OMe + TsT | ucuAcGAGAccucccGGGGTsT | 443 |
| | (antisense) | | |
| 31345 | HCVa:325U21 siRNA inv stab07 (sense) | B AGAuGcucuGGAGGGccccTT B | 444 |
| 31346 | HCVa:343L21 siRNA (325C) inv stab08 (antisense) | GGGGcccuccAGAGcAucuTsT | 445 |
| 31702 | HCVa:326U21 siRNA stab07 (sense) | B cccGGGAGGucucGuAGAcTT B | 446 |
| 31706 | HCVa:344L21 siRNA (326C) stab08 (antisense) | GucuAcGAGAccucccGGGTsT | 447 |
| 31710 | HCVa:326U21 siRNA inv stab07 (sense) | B cAGAuGcucuGGAGGGcccTT B | 448 |
| 31714 | HCVa:344L21 siRNA (326C) inv stab08 (antisense) | GGGcccuccAGAGcAucuGTsT | 449 |
| 31703 | HCVa:327U21 siRNA stab07 (sense) | B ccGGGAGGucucGuAGAccTT B | 450 |
| 31707 | HCVa:345L21 siRNA (327C) stab08 (antisense) | GGucuAcGAGAccucccGGTsT | 451 |
| 31711 | HCVa:327U21 siRNA inv stab07 (sense) | B ccAGAuGcucuGGAGGGccTT B | 452 |
| 31715 | HCVa:345L21 siRNA (327C) inv stab08 (antisense) | GGcccuccAGAGcAucuGGTsT | 453 |
| 31704 | HCVa:328U21 siRNA stab07 (sense) | B cGGGAGGucucGuAGAccGTT B | 454 |
| 31708 | HCVa:346L21 siRNA (328C) stab08 (antisense) | cGGucuAcGAGAccucccGTsT | 455 |
| 31712 | HCVa:328U21 siRNA inv stab07 (sense) | B GccAGAuGcucuGGAGGGcTT B | 456 |
| 31716 | HCVa:346L21 siRNA (328C) inv stab08 (antisense) | GcccuccAGAGcAucuGGcTsT | 457 |
| 31705 | HCVa:329U21 siRNA stab07 (sense) | B GGGAGGucucGuAGAccGuTT B | 458 |
| 31709 | HCVa:347L21 siRNA (329C) stab08 (antisense) | AcGGucuAcGAGAccucccTsT | 459 |
| 31713 | HCVa:329U21 siRNA inv stab07 (sense) | B uGccAGAuGcucuGGAGGGTT B | 460 |
| 31717 | HCVa:347L21 siRNA (329C) inv stab08 (antisense) | cccuccAGAGcAucuGGcATsT | 461 |
| | HCVa:327 siRNA 3′-classI 10bp | UCUCGUAGACCUUGGUCUACGAGACCUCCCGGTT | 462 |
| | HCVa:327 siRNA 3′-classI 8bp | UCGUAGACCUUGGUCUACGAGACCUCCCGGTT | 463 |
| | HCVa:327 siRNA 3′-classI 6bp | GUAGACCUUGGUCUACGAGACCUCCCGGTT | 464 |
| | HCVa:327 siRNA 3′-classI 4bp | AGACCUUGGUCUACGAGACCUCCCGGTT | 465 |
| | HCVa:327 siRNA 5′-classI 10bp | GGUCUACGAGACCUCCCGGUUCCGGGAGGUCU | 466 |
| | HCVa:327 siRNA 5′-classI 8bp | GGUCUACGAGACCUCCCGGUUCCGGGAGGU | 467 |
| | HCVa:327 siRNA 5′-classI 6bp | GGUCUACGAGACCUCCCGGUUCCGGGAG | 468 |
| | HCVa:327 siRNA 5′-classI 4bp | GGUCUACGAGACCUCCCGGUUCCGGG | 469 |
| | HCVa:327 siRNA 3′-gaaa 10bp | CUCGUAGACCGAAAGGUCUACGAGACCUCCCGGTT | 470 |
| | HCVa:327 siRNA 3′-gaaa 8bp | CGUAGACCGAAAGGUCUACGAGACCUCCCGGTT | 471 |
| | HCVa:327 siRNA 3′-gaaa 6bp | UAGACCGAAAGGUCUACGAGACCUCCCGGTT | 472 |
| | HCVa:327 siRNA 3′-gaaa 4bp | GACCGAAAGGUCUACGAGACCUCCCGGTT | 473 |
| | HCVa:327 siRNA 5′-gaaa 10bp | GGUCUACGAGACCUCCCGGUUGAAACCGGGAGGUC | 474 |
| | HCVa:327 siRNA 5′-gaaa 8bp | GGUCUACGAGACCUCCCGGUUGAAACCGGGAGG | 475 |
| | HCVa:327 siRNA 5′-gaaa 6bp | GGUCUACGAGACCUCCCGGUUGAAACCGGGA | 476 |
| | HCVa:327 siRNA 5′-gaaa 4bp | GGUCUACGAGACCUCCCGGUUGAAACCGG | 477 |
| | HCVa:327 siRNA 3′-uuuguguag 10bp | CGUAGACCUUUUUGUGUAGGGUCUACGAGACCUCCCGGTT | 478 |
| | HCVa:327 siRNA 3′-uuuguguag 8bp | UAGACCUUUUUGUGUAGGGUCUACGAGACCUCCCGGTT | 479 |
| | HCVa:327 siRNA 3′-uuuguguag 6bp | GACCUUUUUGUGUAGGGUCUACGAGACCUCCCGGTT | 480 |
| | HCVa:327 siRNA 3′-uuuguguag 4bp | CCUUUUUGUGUAGGGUCUACGAGACCUCCCGGTT | 481 |
| | HCVa:327 siRNA 5′-uuuguguag 10bp | GGUCUACGAGACCUCCCGGUUUUUGUGUAGCCGGGAGGUC | 482 |
| | HCVa:327 siRNA 5′-uuuguguag 8bp | GGUCUACGAGACCUCCCGGUUUUUGUGUAGCCGGGAGG | 483 |
| | HCVa:327 siRNA 5′-uuuguguag 6bp | GGUCUACGAGACCUCCCGGUUUUUGUGUAGCCGGGA | 484 |
| | HCVa:327 siRNA 5′-uuuguguag 4bp | GGUCUACGAGACCUCCCGGUUUUUGUGUAGCCGG | 485 |
| | HCVa:327 siRNA 3′-classI 10bp stab08 (antisense) | ucucGuAGAccuuGGucuAcGAGAccucccGGTsT | 486 |
| | HCVa:327 siRNA 3′-classI 8bp stab08 (antisense) | ucGuAGAccuuGGucuAcGAGAccucccGGTsT | 487 |
| | HCVa:327 siRNA 3′-classI 6bp stab08 (antisense) | GuAGAccuuGGucuAcGAGAccucccGGTsT | 488 |
| | HCVa:327 siRNA 3′-classI 4bp stab08 (antisense) | AGAccuuGGucuAcGAGAccucccGGTsT | 489 |
| | HCVa:327 siRNA 5′-classI 10bp stab08 (antisense) | GGucuAcGAGAccucccGGuuccGGGAGGucu | 490 |
| | HCVa:327 siRNA 5′-classI 8bp stab08 (antisense) | GGucuAcGAGAccucccGGuuccGGGAGGu | 491 |
| | HCVa:327 siRNA 5′-classI 6bp stab08 (antisense) | GGucuAcGAGAccucccGGuuccGGGAG | 492 |
| | HCVa:327 siRNA 5′-classI 4bp stab08 (antisense) | GGucuAcGAGAccucccGGuuccGGG | 493 |
| | HCVa:327 siRNA 3′-gaaa 10bp stab08 (antisense) | cucGuAGAccGAAAGGucuAcGAGAccucccGGTsT | 494 |
| | HCVa:327 siRNA 3′-gaaa 8bp stab08 (antisense) | cGuAGAccGAAAGGucuAcGAGAccucccGGTsT | 495 |
| | HCVa:327 siRNA 3′-gaaa 6bp stab08 (antisense) | uAGAccGAAAGGucuAcGAGAccucccGGTsT | 496 |
| | HCVa:327 siRNA 3′-gaaa 4bp stab08 (antisense) | GAccGAAAGGucuAcGAGAccucccGGTsT | 497 |
| | HCVa:327 siRNA 5′-gaaa 10bp stab08 (antisense) | GGucuAcGAGAccucccGGuuGAAAccGGGAGGuc | 498 |
| | HCVa:327 siRNA 5′-gaaa 8bp stab08 (antisense) | GGucuAcGAGAccucccGGuuGAAAccGGGAGG | 499 |
| | HCVa:327 siRNA 5′-gaaa 6bp stab08 (antisense) | GGucuAcGAGAccucccGGuuGAAAccGGGA | 500 |
| | HCVa:327 siRNA 5′-gaaa 4bp stab08 (antisense) | GGucuAcGAGAccucccGGuuGAAAccGG | 501 |
| | HCVa:327 siRNA 3′-uuuguguag 10bp stab08 (antisense) | cGuAGAccuuuuuGuGuAGGGucuAcGAGAccucccGGTsT | 502 |
| | HCVa:327 siRNA 3′-uuuguguag 8bp stab08 (antisense) | uAGAccuuuuuGuGuAGGGucuAcGAGAccucccGGTsT | 503 |
| | HCVa:327 siRNA 3′-uuuguguag 6bp stab08 (antisense) | GAccuuuuuGuGuAGGGucuAcGAGAccucccGGTsT | 504 |
| | HCVa:327 siRNA 3′-uuuguguag 4bp stab08 (antisense) | ccuuuuuGuGuAGGGucuAcGAGAccucccGGTsT | 505 |
| | HCVa:327 siRNA 5′-uuuguguag 10bp stab08 (antisense) | GGucuAcGAGAccucccGGuuuuuGuGuAGccGGGAGGuc | 506 |
| | HCVa:327 siRNA 5′-uuuguguag 8bp stab08 (antisense) | GGucuAcGAGAccucccGGuuuuuGuGuAGccGGGAGG | 507 |
| | HCVa:327 siRNA 5′-uuuguguag 6bp stab08 (antisense) | GGucuAcGAGAccucccGGuuuuuGuGuAGccGGGA | 508 |
| | HCVa:327 siRNA 5′-uuuguguag 4bp stab08 (antisense) | GGucuAcGAGAccucccGGuuuuuGuGuAGccGG | 509 |
| | HCVa:347L23 siRNA (327C) stab08 (antisense) | AcGGucuAcGAGAccucccGGTsT | 510 |
| | HCVa:346L22 siRNA (327C) stab08 (antisense) | cGGucuAcGAGAccucccGGTsT | 511 |
| | HCVa:344L20 siRNA (327C) stab08 (antisense) | GucuAcGAGAccucccGGTsT | 512 |
| | HCVa:343L19 siRNA (327C) stab08 (antisense) | ucuAcGAGAccucccGGTsT | 513 |
| | HCVa:342L18 siRNA (327C) stab08 (antisense) | cuAcGAGAccucccGGTsT | 514 |
| | HCVa:341L17 siRNA (327C) stab08 (antisense) | uAcGAGAccucccGGTsT | 515 |
| | HCVa:340L16 siRNA (327C) stab08 (antisense) | AcGAGAccucccGGTsT | 516 |
| | HCVa:339L15 siRNA (327C) stab08 (antisense) | cGAGAccucccGGTsT | 517 |
| | HCVa:345L21 siRNA (327C) stab08 GG (antisense) | GGucuAcGAGAccucccGGGsG | 518 |
| | HCVa:345L20 siRNA (327C) stab08 G (antisense) | GGucuAcGAGAccucccGGsG | 519 |
| | HCVa:345L20 siRNA (327C) stab08 (antisense) | GGucuAcGAGAccucccGGsT | 520 |
| | HCVa:345L19 siRNA (327C) stab08 (antisense) | GGucuAcGAGAccucccGsG | 521 |
| | HCVa:345L18 siRNA (327C) stab08 (antisense) | GGucuAcGAGAccucccsG | 522 |
| | HCVa:345L17 siRNA (327C) stab08 (antisense) | GGucuAcGAGAccuccsc | 523 |
| | HCVa:345L16 siRNA (327C) stab08 (antisense) | GGucuAcGAGAccucsc | 524 |
| | HCVa:345L15 siRNA (327C) stab08 (antisense) | GGucuAcGAGAccusc | 525 |
| | HCVa:327U21 siRNA stab07 GT (sense) | B ccGGGAGGucucGuAGAccGT B | 526 |
| | HCVa:327U21 siRNA stab07 (sense) | B cGGGAGGucucGuAGAccTT B | 527 |
| | HCVa:328U20 siRNA stab07 (sense) | B GGGAGGucucGuAGAccTT B | 528 |
| | HCVa:329U19 siRNA stab07 (sense) | B GGAGGucucGuAGAccTT B | 529 |
| | HCVa:330U18 siRNA stab07 (sense) | B GAGGucucGuAGAccTT B | 530 |
| | HCVa:331U17 siRNA stab07 (sense) | B AGGucucGuAGAccTT B | 531 |
| | HCVa:332U16 siRNA stab07 (sense) | B ccGGGAGGucucGuAGAccT B | 532 |
| | HCVa:327U21 siRNA stab07 (sense) | B ccGGGAGGucucGuAGAcc B | 533 |
| | HCVa:327U21 siRNA stab07 (sense) | B ccGGGAGGucucGuAGAc B | 534 |
| | HCVa:327U21 siRNA stab07 (sense) | B ccGGGAGGucucGuAGA B | 535 |
| | HCVa:327U21 siRNA stab07 (sense) | B ccGGGAGGucucGuAG B | 536 |
| 31270 | FLT1:349U21 siRNA stab09 (sense) | B CUGAGUUUAAAAGGCACCCTT B | 537 |
| 31273 | FLT1:367L21 siRNA (349C) stab10 (antisense) | GGGUGCCUUUUAAACUCAGTsT | 538 |
| 31276 | FLT1:349U21 siRNA stab09 inv (sense) | B CCCACGGAAAAUUUGAGUCTT B | 539 |
| 31279 | FLT1:367L21 siRNA (349C) stab10 inv (antisense) | GACUCAAAUUUUCCGUGGGTsT | 540 |
| 31679 | HBV1598 all RNA (sense) | AGGUGAAGCGAAGUGCACAUU | 541 |
| 31336 | HBV:1580U21 siRNA inv stab09 (sense) | B UCCACUUCGCUUCACGUGUTT B | 542 |
| 31338 | HBV:1598L21 siRNA (1580C) inv stab10 (antisense) | ACACGUGAAGCGAAGUGGATsT | 543 |
| 32636 | Luc3:80U21 siRNA stab07 (sense) | B AuAAGGcuAuGAAGAGAuATT B | 544 |
| 32676 | Luc3:98L21 siRNA (80C) stab08 (antisense) | uAucucuucAuAGccuuAuTsT | 545 |
| 32640 | Luc3:237U21 siRNA stab07 (sense) | B cGuAuGcAGuGAAAAcucuTT B | 546 |
| 32680 | Luc3:255L21 siRNA (237C) stab08 (antisense) | AGAGuuuucAcuGcAuAcGTsT | 547 |
| 32662 | Luc3:1478U21 siRNA stab07 (sense) | B uGAcGGAAAAAGAGAucGuTT B | 548 |
| 32702 | Luc3:1496L21 siRNA (1478C) stab08 (antisense) | AcGAucucuuuuuccGucATsT | 549 |
| 32666 | Luc3:1544U21 siRNA stab07 (sense) | B GAGuuGuGuuuGuGGAcGATT B | 550 |
| 32706 | Luc3:1562L21 siRNA (1544C) stab08 (antisense) | ucGuccAcAAAcAcAAcucTsT | 551 |
| 32672 | Luc3:1607U21 siRNA stab07 (sense) | B GAGAGAuccucAuAAAGGcTT B | 552 |
| 32712 | Luc3:1625L21 siRNA (1607C) stab08 (antisense) | GccuuuAuGAGGAucucucTsT | 553 |
| 33139 | HCVa:282U21 siRNA stab07 (sense) | B GcGAAAGGccuuGuGGuAcTT B | 554 |
| 33179 | HCVa:300L21 siRNA (282C) stab08 (antisense) | GuAccAcAAGGccuuucGcTsT | 555 |
| 33140 | HCVa:283U21 siRNA stab07 (sense) | B cGAAAGGccuuGuGGuAcuTT B | 556 |
| 33180 | HCVa:301L21 siRNA (283C) stab08 (antisense) | AGuAccAcAAGGccuuucGTsT | 557 |
| 33145 | HCVa:289U21 siRNA stab07 (sense) | B GccuuGuGGuAcuGccuGATT B | 558 |
| 33185 | HCVa:307L21 siRNA (289C) stab08 (antisense) | ucAGGcAGuAccAcAAGGcTsT | 559 |
| 33149 | HCVa:304U21 siRNA stab07 (sense) | B cuGAuAGGGuGcuuGcGAGTT B | 560 |
| 33183 | HCVa:304L21 siRNA (286C) stab08 (antisense) | GGcAGuAccAcAAGGccuuTsT | 561 |
| 33150 | HCVa:305U21 siRNA stab07 (sense) | B uGAuAGGGuGcuuGcGAGuTT B | 562 |
| 33190 | HCVa:323L21 siRNA (305C) stab08 (antisense) | AcucGcAAGcAcccuAucATsT | 563 |
| 33151 | HCVa:307U21 siRNA stab07 (sense) | B AuAGGGuGcuuGcGAGuGcTT B | 564 |
| 33191 | HCVa:325L21 siRNA (307C) stab08 (antisense) | GcAcucGcAAGcAcccuAuTsT | 565 |
| 33158 | HCVa:317U21 siRNA stab07 (sense) | B uGcGAGuGccccGGGAGGuTT B | 566 |
| 33187 | HCVa:317L21 siRNA (299C) stab08 (antisense) | AAGcAcccuAucAGGcAGuTsT | 567 |
| 33210 | HBV:258U21 siRNA stab07 (sense) | B GuGGuGGAcuucucucAAuTT B | 568 |
| 33250 | HBV:276L21 siRNA (258C) stab08 (antisense) | AuuGAGAGAAGuccAccAcTsT | 569 |
| 33212 | HBV:260U21 siRNA stab07 (sense) | B GGuGGAcuucucucAAuuuTT B | 570 |
| 33252 | HBV:278L21 siRNA (260C) stab08 (antisense) | AAAuuGAGAGAAGuccAccTsT | 571 |
| 33214 | HBV:263U21 siRNA stab07 (sense) | B GGAcuucucucAAuuuucuTT B | 572 |
| 33254 | HBV:281L21 siRNA (263C) stab08 (antisense) | AGAAAAuuGAGAGAAGuccTsT | 573 |
| 32429 | HBV:1583U21 siRNA stab07 (sense) | B GcAcuucGcuucAccucuGTT B | 574 |
| 32438 | HBV:1601L21 siRNA (1583C) stab08 (antisense) | cAGAGGuGAAGcGAAGuGcTsT | 575 |
| 33226 | HBV:1585U21 siRNA stab07 (sense) | B AcuucGcuucAccucuGcATT B | 576 |
| 33266 | HBV:1603L21 siRNA (1585C) stab08 (antisense) | uGcAGAGGuGAAGcGAAGuTsT | 577 |
| 31651 | HBV:1580U21 siRNA stab06 (sense) | B UGUGCACUUCGCUUCACCUTT B | 578 |
| 31652 | HBV:1580U21 siRNA inv stab06 (sense) | B UCCACUUCGCUUCACGUGUTT B | 579 |
| 31653 | HBV:1580U21 siRNA stab16 (sense) | B UGUGCACUUCGCUUCACCUTT B | 580 |
| 31654 | HBV:1580U21 siRNA inv stab16 (sense) | B UCCACUUCGCUUCACGUGUTT B | 581 |
| 31657 | HBV:1580U21 siRNA stab18 (sense) | B uGuGcAcuucGcuucAccuTT B | 582 |
| 31658 | HBV:1580U21 siRNA inv stab18 (sense) | B uccAcuucGcuucAcGuGuTT B | 583 |
| 33573 | HBV:1598L20 siRNA (1581C) stab08 (antisense) | AGGuGAAGcGAAGuGcAcTsT | 584 |
| 33577 | HBV:1581U20 siRNA stab07 modB (sense) | GuGcAcuucGcuucAccuTT | 585 |
| 34124 | HBV:264L15 (246C) 5′p palindrome siRNA | pCACGAGUCUAGACUC GUGB | 586 |
| 34428 | 5′ n-3 C31270 FLT1:349U21 siRNA stab09 (sense) | GAGUUUAAAAGGCACCCTT B | 587 |
| 34429 | 5′ n-4 C31270 FLT1:349U21 siRNA stab09 (sense) | AGUUUAAAAGGCACCCTT B | 588 |
| 34430 | 5′ n-5 C31270 FLT1:349U21 siRNA stab09 (sense) | GUUUAAAAGGCACCCTT B | 589 |
| 34431 | 5′ n-7 C31270 FLT1:349U21 siRNA stab09 (sense) | UUAAAAGGCACCCTT B | 590 |
| 34432 | 5′ n-9 C31270 FLT1:349U21 siRNA stab09 (sense) | AAAAGGCACCCTT B | 591 |
| 34435 | 3′ n-3 C31270 FLT1:349U21 siRNA stab09 (sense) | B CUGAGUUUAAAAGGCACCC | 592 |
| 34436 | 3′ n-4 C31270 FLT1:349U21 siRNA stab09 (sense) | B CUGAGUUUAAAAGGCACC | 593 |
| 34437 | 3′ n-5 C31270 FLT1:349U21 siRNA stab09 (sense) | B CUGAGUUUAAAAGGCAC | 594 |
| 34438 | 3′ n-7 C31270 FLT1:349U21 siRNA stab09 (sense) | B CUGAGUUUAAAAGGC | 595 |
| 34439 | 5′ n-1 C31273 FLT1:367L21 siRNA (349C) stab10 | GGUGCCUUUUAAACUCAGTsT | 596 |
| | (antisense) | | |
| 34440 | 5′ n-2 C31273 FLT1:367L21 siRNA (349C) stab10 | GUGCCUUUUAAACUCAGTsT | 597 |
| | (antisense) | | |
| 34441 | 5′ n-3 C31273 FLT1:367L21 siRNA (349C) stab10 | UGCCUUUUAAACUCAGTsT | 598 |
| | (antisense) | | |
| 34442 | 5′ n-4 C31273 FLT1:367L21 siRNA (349C) stab10 | GCCUUUUAAACUCAGTsT | 599 |
| | (antisense) | | |
| 34443 | 5′ n-5 C31273 FLT1:367L21 siRNA (349C) stab10 | CCUUUUAAACUCAGTsT | 600 |
| | (antisense) | | |
| 34444 | 3′ n-1 C31273 FLT1:367L21 siRNA (349C) stab10 | GGGUGCCUUUUAAACUCAGT | 601 |
| | (antisense) | | |
| 34445 | 3′ n-2 C31273 FLT1:367L21 siRNA (349C) stab10 | GGGUGCCUUUUAAACUCAG | 602 |
| | (antisense) | | |
| 34446 | 3′ n-3 C31273 FLT1:367L21 siRNA (349C) stab10 | GGGUGCCUUUUAAACUCA | 603 |
| | (antisense) | | |
| 34447 | 3′ n-4 C31273 FLT1:367L21 siRNA (349C) stab10 | GGGUGCCUUUUAAACUC | 604 |
| | (antisense) | | |
| 34448 | 3′ n-5 C31273 FLT1:367L21 siRNA (349C) stab10 | GGGUGCCUUUUAAACU | 605 |
| | (antisense) | | |
| 34449 | 3′ n-7 C31273 FLT1:367L21 siRNA (349C) stab10 | GGGUGCCUUUUAAA | 606 |
| | (antisense) | | |
| 34450 | 3′ n-9 C31273 FLT1:367L21 siRNA (349C) stab10 | GGGUGCCUUUUA | 607 |
| | (antisense) | | |
| 34501 | EGFPc1:1106L21 siRNA (1088C) stab08 Blunt (antisense) | uucAccuuGAuGccGuucU | 608 |
| 34503 | KDR:3733L21 siRNA (3715C) stab08 Blunt (antisense) | GccAGcAGuccAGcAuGGU | 609 |
| 34505 | KDR:3733L21 siRNA (3715C) inv stab08 Blunt (antisense) | uGGuAcGAccuGAcGAccG | 610 |
| 34727 | HBV:263U21 siRNA stab00 5′(n-1) (sense) | GACUUCUCUCAAUUUUCUTT | 611 |
| 34728 | HBV:281L21 siRNA stab00 (263C) 3′(n-1) (antisense) | AGAAAAUUGAGAGAAGUCTT | 612 |
| 34729 | HBV:263U21 siRNA stab00 5′(n-2) (sense) | ACUUCUCUCAAUUUUCUTT | 613 |
| 34730 | HBV:281L21 siRNA stab00 (263C) 3′(n-2) (antisense) | AGAAAAUUGAGAGAAGUTT | 614 |
| 34731 | HBV:263U21 siRNA stab00 5′(n-3) (sense) | CUUCUCUCAAUUUUCUTT | 615 |
| 34732 | HBV:281L21 siRNA stab00 (263C) 3′(n-3) (antisense) | AGAAAAUUGAGAGAAGTT | 616 |
| 34733 | HBV:263U21 siRNA stab00 5′(n-4) (sense) | UUCUCUCAAUUUUCUTT | 617 |
| 34734 | HBV:281L21 siRNA stab00 (263C) 3′(n-4) (antisense) | AGAAAAUUGAGAGAATT | 618 |
| 34735 | HBV:263U21 siRNA stab00 5′(n-5) (sense) | UCUCUCAAUUUUCUTT | 619 |
| 34736 | HBV:281L21 siRNA stab00 (263C) 3′(n-5) (antisense) | AGAAAAUUGAGAGATT | 620 |
| 35081 | HBV:1601L20 siRNA (1583C) stab24 (antisense) | AGAGGuGAAGcGAAGuGcTsT | 621 |
| 35082 | HBV:1601L20 siRNA (1583C) stab08 N7 (antisense) | AGAGGuGAAGcGAAGuGcTsT | 622 |
| 35279 | Luc3:80U19 siRNA (sense) | AUAAGGCUAUGAAGAGAUA | 623 |
| 35280 | Luc3:1544U19 siRNA (sense) | GAGUUGUGUUUGUGGACGA | 624 |
| 35281 | Luc3:1288U19 siRNA (sense) | GAACACUUCUUCAUCGUUG | 625 |
| 35282 | Luc3:268U19 siRNA (sense) | AUGCCGGUGUUGGGCGCGU | 626 |
| 35283 | rLuc:231U19 siRNA (sense) | CCUUAUUGGUAUGGGCAAA | 627 |
| 35284 | rLuc:165U19 siRNA (sense) | CUCUUCUUAUUUAUGGCGA | 628 |
| 35285 | rLuc:84U19 siRNA (sense) | UGUUCUUGAUUCAUUUAUU | 629 |
| 35286 | rLuc:375U19 siRNA (sense) | GGCAUUUCAUUAUAGCUAU | 630 |
| 35287 | Luc3:98L19 siRNA (80C) (antisense) | UAUCUCUUCAUAGCCUUAU | 631 |
| 35288 | Luc3:1562L19 siRNA (1544C) (antisense) | UCGUCCACAAACACAACUC | 632 |
| 35289 | Luc3:1306L19 siRNA (1288C) (antisense) | CAACGAUGAAGAAGUGUUC | 633 |
| 35290 | Luc3:286L19 siRNA (268C) (antisense) | ACGCGCCCAACACCGGCAU | 634 |
| 35291 | rLuc:249L19 siRNA (231C) (antisense) | UUUGCCCAUACCAAUAAGG | 635 |
| 35292 | rLuc:183L19 siRNA (165C) (antisense) | UCGCCAUAAAUAAGAAGAG | 636 |
| 35293 | rLuc:102L19 siRNA (84C) (antisense) | AAUAAAUGAAUCAAGAACA | 637 |
| 35294 | rLuc:393L19 siRNA (375C) (antisense) | AUAGCUAUAAUGAAAUGCC | 638 |
| 35764 | Luc3:118U19 stab00 siRNA (sense) | AUUGCUUUUACAGAUGCAC | 639 |
| 35765 | Luc3:150U19 stab00 siRNA (sense) | CAUCACUUACGCUGAGUAC | 640 |
| 35766 | Luc3:255U19 stab00 siRNA (sense) | UCUUCAAUUCUUUAUGCCG | 641 |
| 35767 | Luc3:325U19 stab00 siRNA (sense) | UAUAAUGAACGUGAAUUGC | 642 |
| 35768 | Luc3:326U19 stab00 siRNA (sense) | AUAAUGAACGUGAAUUGCU | 643 |
| 35769 | Luc3:470U19 stab00 siRNA (sense) | AUUACCAGGGAUUUCAGUC | 644 |
| 35770 | Luc3:503U19 stab00 siRNA (sense) | UCACAUCUCAUCUACCUCC | 645 |
| 35771 | Luc3:595U19 stab00 siRNA (sense) | UCUGGAUCUACUGGUCUGC | 646 |
| 35772 | Luc3:676U19 stab00 siRNA (sense) | AUUUUUGGCAAUCAAAUCA | 647 |
| 35773 | Luc3:761U19 stab00 siRNA (sense) | GAUAUUUGAUAUGUGGAUU | 648 |
| 35774 | Luc3:764U19 stab00 siRNA (sense) | AUUUGAUAUGUGGAUUUCG | 649 |
| 35775 | Luc3:765U19 stab00 siRNA (sense) | UUUGAUAUGUGGAUUUCGA | 650 |
| 35776 | Luc3:769U19 stab00 siRNA (sense) | AUAUGUGGAUUUCGAGUCG | 651 |
| 35777 | Luc3:806U19 stab00 siRNA (sense) | AAGAAGAGCUGUUUCUGAG | 652 |
| 35778 | Luc3:874U19 stab00 siRNA (sense) | UUCUCCUUCUUCGCCAAAA | 653 |
| 35779 | Luc3:875U19 stab00 siRNA (sense) | UCUCCUUCUUCGCCAAAAG | 654 |
| 35780 | Luc3:876U19 stab00 siRNA (sense) | CUCCUUCUUCGCCAAAAGC | 655 |
| 35781 | Luc3:902U19 stab00 siRNA (sense) | UUGACAAAUACGAUUUAUC | 656 |
| 35782 | Luc3:938U19 stab00 siRNA (sense) | CUUCUGGUGGCGCUCCCCU | 657 |
| 35783 | Luc3:1099U19 stab00 siRNA (sense) | CCAUUUUUUGAAGCGAAGG | 658 |
| 35784 | Luc3:1100U19 stab00 siRNA (sense) | CAUUUUUUGAAGCGAAGGU | 659 |
| 35785 | Luc3:1293U19 stab00 siRNA (sense) | CUUCUUCAUCGUUGACCGC | 660 |
| 35786 | Luc3:1340U19 stab00 siRNA (sense) | AUCAGGUGGCUCCCGCUGA | 661 |
| 35787 | Luc3:1512U19 stab00 siRNA (sense) | UCAAGUAACAACCGCGAAA | 662 |
| 35788 | Luc3:1513U19 stab00 siRNA (sense) | CAAGUAACAACCGCGAAAA | 663 |
| 35789 | Luc3:136L19 (118C) stab00 siRNA (antisense) | GUGCAUCUGUAAAAGCAAU | 664 |
| 35790 | Luc3:168L19 (150C) stab00 siRNA (antisense) | GUACUCAGCGUAAGUGAUG | 665 |
| 35791 | Luc3:273L19 (255C) stab00 siRNA (antisense) | CGGCAUAAAGAAUUGAAGA | 666 |
| 35792 | Luc3:343L19 (325C) stab00 siRNA (antisense) | GCAAUUCACGUUCAUUAUA | 667 |
| 35793 | Luc3:344L19 (326C) stab00 siRNA (antisense) | AGCAAUUCACGUUCAUUAU | 668 |
| 35794 | Luc3:488L19 (470C) stab00 siRNA (antisense) | GACUGAAAUCCCUGGUAAU | 669 |
| 35795 | Luc3:521L19 (503C) stab00 siRNA (antisense) | GGAGGUAGAUGAGAUGUGA | 670 |
| 35796 | Luc3:613L19 (595C) stab00 siRNA (antisense) | GCAGACCAGUAGAUCCAGA | 671 |
| 35797 | Luc3:694L19 (676C) stab00 siRNA (antisense) | UGAUUUGAUUGCCAAAAAU | 672 |
| 35798 | Luc3:779L19 (761C) stab00 siRNA (antisense) | AAUCCACAUAUCAAAUAUC | 673 |
| 35799 | Luc3:782L19 (764C) stab00 siRNA (antisense) | CGAAAUCCACAUAUCAAAU | 674 |
| 35800 | Luc3:783L19 (765C) stab00 siRNA (antisense) | UCGAAAUCCACAUAUCAAA | 675 |
| 35801 | Luc3:787L19 (769C) stab00 siRNA (antisense) | CGACUCGAAAUCCACAUAU | 676 |
| 35802 | Luc3:824L19 (806C) stab00 siRNA (antisense) | CUCAGAAACAGCUCUUCUU | 677 |
| 35803 | Luc3:892L19 (874C) stab00 siRNA (antisense) | UUUUGGCGAAGAAGGAGAA | 678 |
| 35804 | Luc3:893L19 (875C) stab00 siRNA (antisense) | CUUUUGGCGAAGAAGGAGA | 679 |
| 35805 | Luc3:894L19 (876C) stab00 siRNA (antisense) | GCUUUUGGCGAAGAAGGAG | 680 |
| 35806 | Luc3:920L19 (902C) stab00 siRNA (antisense) | GAUAAAUCGUAUUUGUCAA | 681 |
| 35807 | Luc3:956L19 (938C) stab00 siRNA (antisense) | AGGGGAGCGCCACCAGAAG | 682 |
| 35808 | Luc3:1117L19 (1099C) stab00 siRNA (antisense) | CCUUCGCUUCAAAAAAUGG | 683 |
| 35809 | Luc3:1118L19 (1100C) stab00 siRNA (antisense) | ACCUUCGCUUCAAAAAAUG | 684 |
| 35810 | Luc3:1311L19 (1293C) stab00 siRNA (antisense) | GCGGUCAACGAUGAAGAAG | 685 |
| 35811 | Luc3:1358L19 (1340C) stab00 siRNA (antisense) | UCAGCGGGAGCCACCUGAU | 686 |
| 35812 | Luc3:1530L19 (1512C) stab00 siRNA (antisense) | UUUCGCGGUUGUUACUUGA | 687 |
| 35813 | Luc3:1531L19 (1513C) stab00 siRNA (antisense) | UUUUCGCGGUUGUUACUUG | 688 |
| 35819 | HBV:263U19 siRNA stab07 minus TT & iB (sense) | GGAcuucucucAAuuuucu | 689 |
| 35821 | HBV:281L19 siRNA (263C) stab24 minus TsT (antisense) | AGAAAAuuGAGAGAAGucc | 690 |
| 35911 | HBV:281L19 siRNA (263C) stab00 (antisense) | AGAAAAUUGAGAGAAGUCC | 691 |
| 35912 | PRKCA:1161L19 siRNA (1143C) stab00 (antisense) | AUCCUGAAUCACCACAUCC | 692 |
| 36457 | FLT1:349U19 siRNA stab00 −3′ TT (sense) | CUGAGUUUAAAAGGCACCC | 693 |
| 36459 | FLT1:367L19 siRNA (349C) stab00 +5′ iB −3′ TT | B GGGUGCCUUUUAAACUCAG | 694 |
| | (antisense) | | |
| 36461 | FLT1:349U21 siRNA stab07 −5′ iB −3′ TTB (sense) | cuGAGuuuAAAAGGcAccc | 695 |
| 36462 | FLT1:367L19 siRNA (349C) stab08 −3′ TsT (antisense) | GGGuGccuuuuAAAcucAG | 696 |
| 32714 | HCVa:313L21 siRNA (295C) v1 5′p palindrome | pACCCUAUCAGGCAGUACCA GUACUGCCUGAU B | 697 |
| 32715 | HCVa:313L21 siRNA (295C) v2 5′p palindrome | pACCCUAUCAGGCAGUACC GGUACUGCCUGAU B | 698 |
| 32716 | HCVa: 5′p-345L21 (327C) v5 5′p palindrome siRNA | pGGUCUACGAGACCUCCCGG AGGUCUCGUAGA B | 699 |
| 32717 | HCVa: 5′p-345L21 (327C) v6 5′p palindrome siRNA | pGGUCUACGAGACCUCC GGAGGUCUCGUA B | 700 |
| 32718 | FLT1:367L21 siRNA (349C) v1 5′p palindrome | pGGGUGCCUUUUAAACUC GAGUUUAAAAG B | 701 |
| 32719 | FLT1:367L21 siRNA (349C) v2 5′p palindrome | pGGGUGCCUUUUAAACUCAG GAGUUUAAAAG B | 702 |
| 32720 | FLT1:2967L21 siRNA (2949C) v1 5′p palindrome | pCAUCAGAGGCCCUCCUUGC AAGGAGGGCCUCU B | 703 |
| 32721 | FLT1:2967L21 siRNA (2949C) v2 5′p palindrome | pCAUCAGAGGCCCUCCUU AAGGAGGGCCUCUG B | 704 |
| 32722 | FLT1:2967L21 siRNA (2949C) v3 5′p palindrome | pCAUCAGAGGCCCUCCU AGGAGGGCCUCUG B | 705 |
| 32723 | mFAS:942L21 siRNA (924C; JL873 v1 5′p palindrome | pGUUCUGCGACAUUCGGCUU GCCGAAUGUCGCCA B | 706 |
| 32724 | mFAS:942L21 siRNA (924C; JL873) v2 5′p palindrome | pGUUCUGCGACAUUCGGC GCCGAAUGUCGCCA B | 707 |
| 32725 | HBV: 1598L21 (1580C) V palindrome siRNA | AGGUGAAGCGAAGUGCACA CUUCGCUUCA u B | 708 |
| 32726 | HBV:5′p-1598L21(1580C) v1 5′p palindrome siRNA | pAGGUGAAGCGAAGUG CACUUCGCUU B | 709 |
| 32727 | HBV:5′p-1598L21(1580C) v2 5′p palindrome siRNA | pAGGUGAAGCGAAGUG CACUUCGCUUC B | 710 |
| 32728 | HBV:5′p-1598L21(1580C) v3 5′p palindrome siRNA | pAGGUGAAGCGAAGUG CACUUCGCUUCAC B | 711 |
| 32729 | HBV:5′p-1598L21(1580C) v4 5′p palindrome siRNA | pAGGUGAAGCGAAGU ACUUCGCUUCAC B | 712 |
| 32805 | FLT1:373L21 siRNA (354C) v1 5′p palindrome | pGUGCUGGGUGCCUUUUAAA AGGCACCCAGC B | 713 |
| 32806 | FLT1:373L21 siRNA (354C) v2 5′p palindrome | pGUGCUGGGUGCCUUUAAA GGCACCCAGC B | 714 |
| 32807 | FLT1:373L21 siRNA (354C) v3 5′p palindrome | pGUGCUGGGUGCCUUAAGGCACCCAGC B | 715 |
| 32808 | FLT1:1247L21 siRNA (1229C) v1 5′p palindrome | pAAUGCUUUAUCAUAUAUAU GAUAAAGC B | 716 |
| 32809 | FLT1:1247L21 siRNA (1229C) v2 5′p palindrome | pAAUGCUUUAUCAUAUAU GAUAAAGC B | 717 |
| 32810 | FLT1:1247L21 siRNA (1229C) v3 5′p palindrome | pAAUGCUUUAUCAUAU GAUAAAGC B | 718 |
| 32811 | FLT1:1247L21 siRNA (1229C) v4 5′p palindrome | pAAUGCUUUAUCAUAU GAUAAAGCA B | 719 |
| 32812 | FLT1:1247L21 siRNA (1229C) v5 5′p palindrome | pAAUGCUUUAUCAUAUAU GAUAAAGCAUU B | 720 |
| 32813 | FLT1:1247L21 siRNA (1229C) v6 5′p palindrome | pAAUGCUUUAUCAUAU GAUAAAGCAUU B | 721 |
| 33056 | FLT1:367L21 siRNA (349C) v3 5′p palindrome | pGGGUGCCUUUUAAACUCAG GAGUUUAAAAGG B | 722 |
| 33057 | FLT1:367L21 siRNA (349C) v4 5′p palindrome | pGGGUGCCUUUUAAACUC GAGUUUAAAAGGCA B | 723 |
| 33058 | FLT1:367L21 siRNA (349C) v5 5′p palindrome | pGGGUGCCUUUUAAACU AGUUUAAAAGG B | 724 |
| 33059 | FLT1:367L21 siRNA (349C) v6 5′p palindrome | pGGGUGCCUUUUAAACU AGUUUAAAAGGC B | 725 |
| 33060 | FLT1:367L21 siRNA (349C) v7 5′p palindrome | pGGGUGCCUUUUAAACU AGUUUAAAAGGCA B | 726 |
| 33061 | FLT1:367L21 siRNA (349C) v8 5′p palindrome | pGGGUGCCUUUUAAACU AGUUUAAAAGGCAC B | 727 |
| 33062 | FLT1:367L21 siRNA (349C) v9 5′p palindrome | pGGGUGCCUUUUAAAC GUUUAAAAGGC B | 728 |
| 33063 | FLT1:367L21 siRNA (349C) v10 5′p palindrome | pGGGUGCCUUUUAAAC GUUUAAAAGGCA B | 729 |
| 33064 | FLT1:367L21 siRNA (349C) v11 5′p palindrome | pGGGUGCCUUUUAAAC GUUUAAAAGGCAC B | 730 |
| 34092 | FLT1:373L18 siRNA (354C) v4 5′p palindrome | pUGCUGGGUGCCUUUUAAA AGGCACCCAGC B | 731 |
| 34093 | FLT1:373L17 siRNA (354C) v5 5′p palindrome | pGCUGGGUGCCUUUUAAA AGGCACCCAGC B | 732 |
| 34094 | FLT1:373L17 siRNA (354C) v6 5′p palindrome | pGCUGGGUGCCUUUUAAA AGGCACCCAGCT B | 733 |
| 34095 | FLT1:373L17 siRNA (354C) v7 5′p palindrome | pGCUGGGUGCCUUUUAAA AGGCACCCAG B | 734 |
| 34096 | FLT1:373L16 siRNA (354C) v8 5′p palindrome | pCUGGGUGCCUUUUAAA AGGCACCCAG B | 735 |
| 34097 | FLT1:373L16 siRNA (354C) v9 5′p palindrome | pCUGGGUGCCUUUUAAA AGGCACCCA B | 736 |
| 34098 | FLT1:373L15 siRNA (354C) v10 5′p palindrome | pUGGGUGCCUUUUAAA AGGCACCCA B | 737 |
| 34099 | FLT1:373L15 siRNA (354C) v11 5′p palindrome | pUGGGUGCCUUUUAAA AGGCACCCAT B | 738 |
| 34100 | FLT1:373L15 siRNA (354C) v12 5′p palindrome | pUGGGUGCCUUUUAAA AGGCACCCATT B | 739 |
| 34101 | FLT1:1247L21 siRNA (1229C) v14 5′p palindrome | pUGCUUUAUCAUAUAUAU GAUAAAGCA B | 740 |
| 34102 | FLT1:1247L21 siRNA (1229C) v15 5′p palindrome | pUGCUUUAUCAUAUAUAU GAUAAAGC B | 741 |
| 34103 | FLT1:1247L21 siRNA (1229C) v16 5′p palindrome | pGCUUUAUCAUAUAUAU GAUAAAGC B | 742 |
| 34104 | FLT1:1247L17 siRNA (1229C) v5 palindrome | AAUGCUUUAUCAUAUAU GAUAAAGCAUU B | 743 |
| 34105 | FLT1:1247L17 siRNA (1229C) v7 5′p palindrome | pAAUGCUUUAUCAUAUAU GAUAAAGCAUUT B | 744 |
| 34106 | FLT1:1247L17 siRNA (1229C) v8 5′p palindrome | pAAUGCUUUAUCAUAUAU GAUAAAGCAUUTT B | 745 |
| 34107 | FLT1:1247L17 siRNA (1229C) v9 5′p palindrome | pAAUGCUUUAUCAUAUAU GAUAAAGCAU B | 746 |
| 34108 | FLT1:1247L16 siRNA (1229C) v10 5′p palindrome | pAUGCUUUAUCAUAUAU GAUAAAGCAU B | 747 |
| 34109 | FLT1:1247L16 siRNA (1229C) v11 5′p palindrome | pAUGCUUUAUCAUAUAU GAUAAAGCAUT B | 748 |
| 34110 | FLT1:1247L16 siRNA (1229C) v12 5′p palindrome | pAUGCUUUAUCAUAUAU GAUAAAGCAUTT B | 749 |
| 34111 | FLT1:1247L16 siRNA (1229C) v13 5′p palindrome | pAUGCUUUAUCAUAUAU GAUAAAGCA B | 750 |
| 34112 | FLT1:1247L17 siRNA (1229C) v14 5′p palindrome | pAAUGCUUUAUCAUAUAU CUAUAAGCAUU B | 751 |
| 34113 | FLT1:1247L17 siRNA (1229C) v15 5′p palindrome | pAAUGCUUUUAGUUAUAU GAUAAAGCAUU B | 752 |
| 34114 | FLT1:1247L17 siRNA (1229C) v16 5′p palindrome | pAAUCCUUAAUCUUAUUU GAUAAAGCAUU B | 753 |
| 34115 | FLT1:1247L17 siRNA (1229C) v17 5′p palindrome | pAAuGcuuuAucAuAuAu GAuAAAGcAuu B | 754 |
| 34116 | FLT1:1247L17 siRNA (1229C) v18 5′p palindrome | pAAuGcuuuAucAuAuAu GAuAAAGcAuu B | 755 |
| 34117 | HBV:197L18 (179C) 5′p palindrome siRNA | pCGAGCAGGGGUCCUAGGA CCCCUGCUCGB | 756 |
| 34118 | HBV:197L17 (179C) 5′p palindrome siRNA | pGAGCAGGGGUCCUAGGA CCCCUGCUCB | 757 |
| 34119 | HBV:197L16 (179C) 5′p palindrome siRNA | pAGCAGGGGUCCUAGGA CCCCUGCUB | 758 |
| 34120 | HBV:197L15 (179C) 5′p palindrome siRNA | pGCAGGGGUCCUAGGA CCCCUGCB | 759 |
| 34121 | HBV:264L19 (246C) 5′p palindrome siRNA | pCCACCACGAGUCUAGACUC GUGGUGGB | 760 |
| 34122 | HBV:264L17 (246C) 5′p palindrome siRNA | pACCACGAGUCUAGACUC GUGGUB | 761 |
| 34123 | HBV:264L16 (246C) 5′p palindrome siRNA | pCCACGAGUCUAGACUC GUGGB | 762 |
| 34125 | HBV:1597L17 (1581C) 5′p palindrome siRNA | pGGUGAAGCGAAGUGCAC UUCGCUUCACCB | 763 |
| 34126 | HBV:1597L16 (1581C) 5′p palindrome siRNA | pGUGAAGCGAAGUGCAC UUCGCUUCACB | 764 |
| 34127 | HBV:1597L15 (1581C) 5′p palindrome siRNA | pUGAAGCGAAGUGCAC UUCGCUUCAB | 765 |
| 34128 | HCVb:100L18 (82C) 5′p palindrome siRNA | pUCAUACUAACGCCAUGGC GUUAGUAUGAB | 766 |
| 34129 | HCVb:100L17 (82C) 5′p palindrome siRNA | pCAUACUAACGCCAUGGC GUUAGUAUGB | 767 |
| 34130 | HCVb:100L16 (82C) 5′p palindrome siRNA | pAUACUAACGCCAUGGC GUUAGUAUB | 768 |
| 34131 | HCVb:100L15 (82C) 5′p palindrome siRNA | pUACUAACGCCAUGGC GUUAGUAB | 769 |
| 34132 | HCVb:144L19 (126C) 5′p palindrome siRNA | pACUAUGGCUCUCCCGGGAG AGCCAUAGUB | 770 |
| 34133 | HCVb:144L18 (126C) 5′p palindrome siRNA | pCUAUGGCUCUCCCGGGAG AGCCAUAGB | 771 |
| 34134 | HCVb:144L17 (126C) 5′p palindrome siRNA | pUAUGGCUCUCCCGGGAG AGCCAUAB | 772 |
| 34135 | HCVb:144L16 (126C) 5′p palindrome siRNA | pAUGGCUCUCCCGGGAG AGCCAUB | 773 |
| 34136 | HCVb:144L15 (126C) 5′p palindrome siRNA | pUGGCUCUCCCGGGAG AGCCAB | 774 |
| 34137 | HCVb:172L17 (155C) 5′p palindrome siRNA | pCCGGUGUACUCACCGGU GAGUACACCGGB | 775 |
| 34138 | HCVb:172L16 (155C) 5′p palindrome siRNA | pCGGUGUACUCACCGGU GAGUACACCGB | 776 |
| 34139 | HCVb:172L15 (155C) 5′p palindrome siRNA | pGGUGUACUCACCGGU GAGUACACCB | 777 |
| 34140 | HCVb:332L17 (315C) 5′p palindrome siRNA | pCUACGAGACCUCCCGGG AGGUCUCGUAGB | 778 |
| 34141 | HCVb:332L16 (315C) 5′p palindrome siRNA | pUACGAGACCUCCCGGG AGGUCUCGUAB | 779 |
| 34142 | HCVb:332L15 (315C) 5′p palindrome siRNA | pACGAGACCUCCCGGG AGGUCUCGUB | 780 |
| 34676 | FLT1:1501U21 siRNA stab00 (sense) | CUCACUGCCACUCUAAUUGTT | 781 |
| 34677 | FLT1:1502U21 siRNA stab00 (sense) | UCACUGCCACUCUAAUUGUTT | 782 |
| 34678 | FLT1:1503U21 siRNA stab00 (sense) | CACUGCCACUCUAAUUGUCTT | 783 |
| 34679 | FLT1:5353U21 siRNA stab00 (sense) | GACCCCGUCUCUAUACCAATT | 784 |
| 34680 | KDR:503U21 siRNA stab00 (sense) | AGAGUGGCAGUGAGCAAAGTT | 785 |
| 34681 | VEGF:360U21 siRNA stab00 (sense) | AGAGACGGGGUCAGAGAGATT | 786 |
| 34682 | VEGF:1562U21 siRNA stab00 (sense) | AGCAUUUGUUUGUACAAGATT | 787 |
| 34683 | HBV:1583U21 siRNA stab00 (sense) | GCACUUCGCUUCACCUCUGTT | 788 |
| 34684 | FLT1:1519L21 (1501C) siRNA stab00 | CAAUUAGAGUGGCAGUGAGTT | 789 |
| 34685 | FLT1:1520L21 (1502C) siRNA stab00 | ACAAUUAGAGUGGCAGUGATT | 790 |
| 34686 | FLT1:1521L21 (1503C) siRNA stab00 | GACAAUUAGAGUGGCAGUGTT | 791 |
| 34687 | FLT1:5371L21 (5353C) siRNA stab00 | UUGGUAUAGAGACGGGGUCTT | 792 |
| 34688 | KDR:521L21 (503C) siRNA stab00 | CUUUGCUCACUGCCACUCUTT | 793 |
| 34689 | VEGF:378L21 (360C) siRNA stab00 | UCUCUCUGACCCCGUCUCUTT | 794 |
| 34690 | VEGF:1580L21 (1562C) siRNA stab00 | UCUUGUACAAACAAAUGCUTT | 795 |
| 34691 | HBV:1601121 siRNA (1583C) stab00 | CAGAGGUGAAGCGAAGUGCTT | 796 |
| 34692 | F/K bf-1a siRNA stab00 [FLT1:1519L21 (1501C) −14 + | CAAUUAGAGUGGCAGUGAGCAAAGTT | 797 |
| | KDR:503U21] | | |
| 34693 | F/K bf-2a siRNA stab00 [FLT1:1520L21 (1502C) −13 + | ACAAUUAGAGUGGCAGUGAGCAAAGTT | 798 |
| | KDR:503U21] | | |
| 34694 | F/K bf-3a siRNA stab00 [FLT1:1521L21 (1503C) −12 + | GACAAUUAGAGUGGCAGUGAGCAAAGTT | 799 |
| | KDR:503U21] | | |
| 34695 | V/F bf-1a siRNA stab00 [FLT1:3664L19 (3646C) −5 + | UGUGCCAGCAGUCCAGCAUUUGUUUGUACAAGATT | 800 |
| | VEGF:1562U21] | | |
| 34696 | V/F bf-2a siRNA stab00 [FLT1:5371L19 (5353C) −12 + | UUGGUAUAGAGACGGGGUCAGAGAGATT | 801 |
| | VEGF:360U21] | | |
| 34697 | F/K bf-1b siRNA stab00 [KDR:521L21 (503C) −14 + | CUUUGCUCACUGCCACUCUAAUUGTT | 802 |
| | FLT1:1501U21] | | |
| 34698 | F/K bf-2b siRNA stab00 [KDR:521L21 (503C) −13 + | CUUUGCUCACUGCCACUCUAAUUGUTT | 803 |
| | FLT1:1502U21] | | |
| 34699 | F/K bf-3b siRNA stab00 [KDR:521L21 (503C) −12 + | CUUUGCUCACUGCCACUCUAAUUGUCTT | 804 |
| | FLT1:1503U21] | | |
| 34700 | V/F bf-1b siRNA stab00 [VEGF:1580L19 (1562C) −5 + | UCUUGUACAAACAAAUGCUGGACUGCUGGCACATT | 805 |
| | FLT1:3646U21] | | |
| 34701 | V/F bf-2b siRNA stab00 [VEGF:378L21 (360C) −12 + | UCUCUCUGACCCCGUCUCUAUACCAATT | 806 |
| | FLT1:5353U21] | | |
| 34702 | V/F bf-3a siRNA stab00 [FLT1:3664L19 (3646C) + | UGUGCCAGCAGUCCAGCAU UGUGAAUGCAGACCAAAGATT | 807 |
| | VEGF1420:U21] | | |
| 34703 | V/F bf-3b siRNA stab00 [VEGF1438:119 (1420C) + | UCUUUGGUCUGCAUUCACA AUGCUGGACUGCUGGCACATT | 808 |
| | FLT1:3646U21] | | |
| 34704 | V/F bf-4a siRNA stab00 [FLT1:3664L17 (3648C) + | UGUGCCAGCAGUCCAGC UGAAUGCAGACCAAAGATT | 809 |
| | VEGF1422:U19] | | |
| 34705 | V/F bf-4b siRNA stab00 [VEGF1438:L17 (1422C) + | UCUUUGGUCUGCAUUCA GCUGGACUGCUGGCACATT | 810 |
| | FLT1:3648U19] | | |
| 34706 | V/F bf-5a siRNA stab00 [FLT1:3664L19 (3646C) + | UGUGCCAGCAGUCCAGCAU GAAUGCAGACCAAAGAAAGTT | 811 |
| | VEGF1423:U19] | | |
| 34707 | V/F bf-5b siRNA stab00 [VEGF1441:L19 (1420C) + | CUUUCUUUGGUCUGCAUUC AUGCUGGACUGCUGGCACATT | 812 |
| | FLT1:3646U21] | | |
| 34708 | V/F bf-6a siRNA stab00 [FLT1:3664L19 (3646C) + | UGUGCCAGCAGUCCAGCAU GUGAAUGCAGACCAAAGAATT | 813 |
| | VEGF1421:U21] | | |
| 34709 | V/F bf-6b siRNA stab00 [VEGF1439:L19 (1421C) + | UUCUUUGGUCUGCAUUCAC AUGCUGGACUGCUGGCACATT | 814 |
| | FLT1:3646U21] | | |
| 34710 | H/P bf-1a siRNA stab00 [HBV:1601L19 (1583C) + | CAGAGGUGAAGCGAAGUGC GGAUGUGGUGAUUCAGGAUTT | 815 |
| | PRKCA:1143U21] | | |
| 34711 | H/P bf-1b siRNA stab00 [PRKCA:1161L19 (1143C) + | AUCCUGAAUCACCACAUCC GCACUUCGCUUCACCUCUGTT | 816 |
| | HBV:1583U21] | | |
| 34712 | H/P bf-2a siRNA stab00 [HBV:281L19 (263C) + | AGAAAAUUGAGAGAAGUCC GGAUGUGGUGAUUCAGGAUTT | 817 |
| | PRKCA:1143U21] | | |
| 34713 | H/P bf-2b siRNA stab00 [PRKCA:1161L19 (1143C) + | AUCCUGAAUCACCACAUCC GGACUUCUCUCAAUUUUCUTT | 818 |
| | HBV:263U21] | | |
| 34955 | HBV:281L19 (263C) v1 palindrome siRNA | AGAAAAUUGAGAGAAGUUUCUCUCAAUUUUCU | 819 |
| 34956 | HBV:281L19 (263C) v2 palindrome siRNA | AGAAAAUUGAGAGAAGCUUCUCUCAAUUUUCU | 820 |
| 34957 | HBV:281L19 (263C) v3 palindrome siRNA | AGAAAAUUGAGAGAAUUCUCUCAAUUUUCU | 821 |
| 34958 | HBV:281L19 (263C) v4 palindrome siRNA | AGAAAAUUGAGAGAAGUUUCUCUCAAUUUUC | 822 |
| 34959 | HBV:281L19 (263C) v5 palindrome siRNA | AGAAAAUUGAGAGAAGCUUCUCUCAAUUUUC | 823 |
| 34960 | HBV:281L19 (263C) v6 palindrome siRNA | AGAAAAUUGAGAGAAUUCUCUCAAUUUUC | 824 |
| 34961 | HBV:281L19 (263C) v7 palindrome siRNA | AGAAAAUUGAGAGAAUUCUCUCAAUUUU | 825 |
| 34962 | HBV:281L19 (263C) v8 palindrome siRNA | AGAAAAUUGAGAGAAUUCUCUCAAUUU | 826 |
| 34963 | HBV:1598L17 (1581C) v1 palindrome siRNA | GGUGAAGCGAAGUGCACUUCGCUUCACC | 827 |
| 34964 | HBV:1598L17 (1581C) v2 palindrome siRNA | GGUGAAGCGAAGUGCACUUCGCUUCACCTT | 828 |
| 34965 | HBV:1598L17 (1581C) v3 palindrome siRNA | GGUGAAGCGAAGUGCACUUCGCUUCACCT | 829 |
| 34966 | HBV:1598L17 (1581C) v4 palindrome siRNA | GGUGAAGCGAAGUGCACUUCGCUUCACU | 830 |
| 34967 | HBV:1598L17 (1581C) v5 palindrome siRNA | GGUGAAGCGAAGUGCACUUCGCUUCACUTT | 831 |
| 34968 | HBV:1598L17 (1581C) v6 palindrome siRNA | GGUGAAGCGAAGUGCACUUCGCUUCAUU | 832 |
| 34969 | HBV:1598L19 (1581C) v1 palindrome siRNA | GAGGUGAAGCGAAGUGCACUUCGCUUCACCUC | 833 |
| 34970 | HBV:1598L19 (1581C) v2 palindrome siRNA | AGGUGAAGCGAAGUGCACUUCGCUUCACCU | 834 |
| 34971 | HBV:265L19 (246C) v1 palindrome siRNA | CCACCACGAGUCUAGACUCGUGGUGG | 835 |
| 34972 | HBV:265L19 (246C) v2 palindrome siRNA | CCACCACGAGUCUAGACUCGUGGUUU | 836 |
| 34973 | HBV:265L18 (246C) v1 palindrome siRNA | CACCACGAGUCUAGACUCGUGGUG | 837 |
| 34974 | HBV:265L18 (246C) v2 palindrome siRNA | CACCACGAGUCUAGACUCGUGGUGTT | 838 |
| 34975 | HBV:265L18 (246C) v3 palindrome siRNA | CACCACGAGUCUAGACUCGUGGUU | 839 |
| 34976 | HBV:265L18 (246C) v4 palindrome siRNA | CACCACGAGUCUAGACUCGUGGUUTT | 840 |
| 34977 | HBV:265L17 (246C) v1 palindrome siRNA | ACCACGAGUCUAGACUCGUGGU | 841 |
| 34978 | HBV:265L17 (246C) v2 palindrome siRNA | ACCACGAGUCUAGACUCGUGGUTT | 842 |
| 35027 | TGFBR1:408L19 (390C) palindrome siRNA | AGUUCUAUUUUAUUGCAAUAAAAUAGAACU | 843 |
| 35028 | TGFBR1:406L17 (390C) palindrome siRNA | UUCUAUUUUAUUGCAAUAAAAUAGAA | 844 |
| 35029 | TGFBR1:799L19 (781C) palindrome siRNA | CGAACGUUCUUCUCUAGAGAAGAACGUUCG | 845 |
| 35030 | TGFBR1:797L17 (781C) palindrome siRNA | AACGUUCUUCUCUAGAGAAGAACGUU | 846 |
| 35031 | TGFBR1:797L19 (779C) v1 palindrome siRNA | AACGUUCUUCUCUAGAGGAAAGAACGUU | 847 |
| 35032 | TGFBR1:1353L19 (1335C) palindrome siRNA | AGUUGGUAAUCUUCAUGAAGAUUACCAACU | 848 |
| 35033 | TGFBR1:1641L19 (1623C) palindrome siRNA | AAACCCAGGAGCAGAUCUGCUCCUGGGUUU | 849 |
| 35034 | TGFBR1:178L19 (160C) palindrome siRNA | UAACGCCGUCGCCCCCGGGGGCGACGGCGUUA | 850 |
| 35035 | TGFBR1:215L19 (197C) palindrome siRNA | UAAAAUUGUCUUUUGUACAAAAGACAAUUUUA | 851 |
| 35036 | TGFBR1:213L17 (197C) v1 palindrome siRNA | AAAUUGUCUUUUGUACAGAAGACAAUUUUA | 852 |
| 35037 | mTGFBR1:3964L19 (3946C) palindrome siRNA | AUUACAUAGAAAUAUUUCUAUGUAAU | 853 |
| 35038 | mTGFBR1:2576L19 (2558C) palindrome siRNA | AAACACUGCUUUGAUCAAAGCAGUGUUU | 854 |
| 35039 | mTGFBR1:2927L19 (2909C) palindrome siRNA | UCUACUCAGAAUAGCUAUUCUGAGUAGA | 855 |
| 35040 | mTGFBR1:3955L19 (3937C) palindrome siRNA | AAAUAUUUCUCUAAUUAGAGAAAUAUUU | 856 |
| 35041 | mTGFBR1:5558L19 (5540C) palindrome siRNA | UACACAUACAAUGUACAUUGUAUGUGUA | 857 |
| 35042 | mTGFBR1:934L19 (916C) palindrome siRNA | UGUGGACAGAGCAAGCUUGCUCUGUCCACA | 858 |
| 35043 | mTGFBR1:1929L19 (1911C) palindrome siRNA | AACCAAGGAAACACUAGUGUUUCCUUGGUU | 859 |
| 35044 | mTGFBR1:2063L19 (2045C) palindrome siRNA | UGUGAAGGAGCUGUGCACAGCUCCUUCACA | 860 |
| 35045 | mTGFBR1:2887L19 (2869C) palindrome siRNA | CAACGUGGCACUGAAUUCAGUGCCACGUUG | 861 |
| 35046 | mTGFBR1:2886L18 (2869C) palindrome siRNA | AACGUGGCACUGAAUUCAGUGCCACGUU | 862 |
| 35047 | mTGFBR1:3437L19 (3419C) palindrome siRNA | ACAUUGAUGAAAUCAUGAUUUCAUCAAUGU | 863 |
| 35048 | mTGFBR1:3684L19 (3666C) palindrome siRNA | AAACCCAUUUCCUUGCAAGGAAAUGGGUUU | 864 |
| 35191 | HBV:243U20c + HBV:263U21 stab00 siRNA | UGUCUCAGAUCUGAGCACCA GGACUUCUCUCAAUUUUCUTT | 865 |
| 35192 | HBV:245U18c + HBV:263U21 stab00 siRNA | UCUCAGAUCUGAGCACCA GGACUUCUCUCAAUUUUCUTT | 866 |
| 35193 | HBV:247U16c + HBV:263U21 stab00 siRNA | UCAGAUCUGAGCACCA GGACUUCUCUCAAUUUUCUTT | 867 |
| 35194 | HBV:249U14c + HBV:263U21 stab00 siRNA | AGAUCUGAGCACCA GGACUUCUCUCAAUUUUCUTT | 868 |
| 35195 | HBV:250U13c + HBV:263U21 stab00 siRNA | GAUCUGAGCACCA GGACUUCUCUCAAUUUUCUTT | 869 |
| 35196 | HBV:251U12c + HBV:263U21 stab00 siRNA | AUCUGAGCACCA GGACUUCUCUCAAUUUUCUTT | 870 |
| 35197 | HBV:252U11c + HBV:263U21 stab00 siRNA | UCUGAGCACCA GGACUUCUCUCAAUUUUCUTT | 871 |
| 35198 | HBV:253U10c + HBV:263U21 stab00 siRNA | CUGAGCACCA GGACUUCUCUCAAUUUUCUTT | 872 |
| 35199 | HBV:254U9c + HBV:263U21 stab00 siRNA | UGAGCACCA GGACUUCUCUCAAUUUUCUTT | 873 |
| 35200 | HBV:255U8c + HBV:263U21 stab00 siRNA | GAGCACCA GGACUUCUCUCAAUUUUCUTT | 874 |
| 35201 | HBV:256U7c + HBV:263U21 stab00 siRNA | AGCACCA GGACUUCUCUCAAUUUUCUTT | 875 |
| 35202 | HBV:257U6c + HBV:263U21 stab00 siRNA | GCACCA GGACUUCUCUCAAUUUUCUTT | 876 |
| 35203 | HBV:258U5c + HBV:263U21 stab00 siRNA | CACCA GGACUUCUCUCAAUUUUCUTT | 877 |
| 35204 | HBV:259U4c + HBV:263U21 stab00 siRNA | ACCA GGACUUCUCUCAAUUUUCUTT | 878 |
| 35205 | HBV:260U3c + HBV:263U21 stab00 siRNA | CCA GGACUUCUCUCAAUUUUCUTT | 879 |
| 35206 | HBV:261U2c + HBV:263U21 stab00 siRNA | CA GGACUUCUCUCAAUUUUCUTT | 880 |
| 35207 | HBV:262U1c + HBV:263U21 stab00 siRNA | A GGACUUCUCUCAAUUUUCUTT | 881 |
| 35208 | HBV:281L21 (263C) + HBV:262L20r stab00 siRNA | AGAAAAUUGAGAGAAGUCC UGGUGCUCAGAUCUGAGACATT | 882 |
| 35209 | HBV:281L21 (263C) + HBV:262L18r stab00 siRNA | AGAAAAUUGAGAGAAGUCC UGGUGCUCAGAUCUGAGATT | 883 |
| 35210 | HBV:281L21 (263C) + HBV:262L16r stab00 siRNA | AGAAAAUUGAGAGAAGUCC UGGUGCUCAGAUCUGATT | 884 |
| 35211 | HBV:281L21 (263C) + HBV:262L14r stab00 siRNA | AGAAAAUUGAGAGAAGUCC UGGUGCUCAGAUCUTT | 885 |
| 35212 | HBV:281L21 (263C) + HBV:262L13r stab00 siRNA | AGAAAAUUGAGAGAAGUCC UGGUGCUCAGAUCTT | 886 |
| 35213 | HBV:281L21 (263C) + HBV:262L12r stab00 siRNA | AGAAAAUUGAGAGAAGUCC UGGUGCUCAGAUTT | 887 |
| 35214 | HBV:281L21 (263C) + HBV:262L11r stab00 siRNA | AGAAAAUUGAGAGAAGUCC UGGUGCUCAGATT | 888 |
| 35215 | HBV:281L21 (263C) + HBV:262L10r stab00 siRNA | AGAAAAUUGAGAGAAGUCC UGGUGCUCAGTT | 889 |
| 35216 | HBV:281L21 (263C) + HBV:262L9r stab00 siRNA | AGAAAAUUGAGAGAAGUCC UGGUGCUCATT | 890 |
| 35217 | HBV:281L21 (263C) + HBV:262L8r stab00 siRNA | AGAAAAUUGAGAGAAGUCC UGGUGCUCTT | 891 |
| 35218 | HBV:281L21 (263C) + HBV:262L7r stab00 siRNA | AGAAAAUUGAGAGAAGUCC UGGUGCUTT | 892 |
| 35219 | HBV:281L21 (263C) + HBV:262L6r stab00 siRNA | AGAAAAUUGAGAGAAGUCC UGGUGCTT | 893 |
| 35220 | HBV:281L21 (263C) + HBV:262L5r stab00 siRNA | AGAAAAUUGAGAGAAGUCC UGGUGTT | 894 |
| 35221 | HBV:281L21 (263C) + HBV:262L4r stab00 siRNA | AGAAAAUUGAGAGAAGUCC UGGUTT | 895 |
| 35222 | HBV:281L21 (263C) + HBV:262L3r stab00 siRNA | AGAAAAUUGAGAGAAGUCC UGGTT | 896 |
| 35223 | HBV:281L21 (263C) + HBV:262L2r stab00 siRNA | AGAAAAUUGAGAGAAGUCC UGTT | 897 |
| 35224 | HBV:281L21 (263C) + HBV:262L1r stab00 siRNA | AGAAAAUUGAGAGAAGUCC UTT | 898 |
| 35225 | HCVa:327 siRNA stab0/0 Pal01 | GGUCUACGAGACCUCCCGG CCGGGAGGUCUCGUAGACC | 899 |
| 35226 | HCVa:327 siRNA stab0/0 Pal02 | GGUCUACGAGACCUCCCGG CCGGGAGGUCUCGUAGACCTT | 900 |
| 35227 | HCVa:327 siRNA stab0/0 Pal03 | GGUCUACGAGACCUCCCG CGGGAGGUCUCGUAGACC | 901 |
| 35228 | HCVa:327 siRNA stab0/0 Pal04 | GGUCUACGAGACCUCCCG CGGGAGGUCUCGUAGACCTT | 902 |
| 35229 | HCVa:327 siRNA stab0/0 Pal05 | GGUCUACGAGACCUCCC GGGAGGUCUCGUAGACC | 903 |
| 35230 | HCVa:327 siRNA stab0/0 Pal06 | GGUCUACGAGACCUCCC GGGAGGUCUCGUAGACCTT | 904 |
| 35231 | HCVa:327 siRNA stab0/0 Pal07 | GGUCUACGAGACCUCC GGAGGUCUCGUAGACC | 905 |
| 35232 | HCVa:327 siRNA stab0/0 Pal08 | GGUCUACGAGACCUCC GGAGGUCUCGUAGACCTT | 906 |
| 35235 | HCVa:327 siRNA stab0/0 Pal11 | GUCUACGAGACCUCCCGG GAGGUCUCGUAGAC | 907 |
| 35236 | HCVa:327 siRNA stab0/0 Pal12 | GUCUACGAGACCUCCCGG GAGGUCUCGUAGACTT | 908 |
| 35237 | HCVa:327 siRNA stab0/0 Pal13 | UCUACGAGACCUCCCGG GAGGUCUCGUAGA | 909 |
| 35238 | HCVa:327 siRNA stab0/0 Pal14 | UCUACGAGACCUCCCGG GAGGUCUCGUAGATT | 910 |
| 35239 | HCVa:327 siRNA stab0/0 Pal15 | CUACGAGACCUCCCGG GAGGUCUCGUAG | 911 |
| 35240 | HCVa:327 siRNA stab0/0 Pal16 | CUACGAGACCUCCCGG GAGGUCUCGUAGTT | 912 |
| 35241 | HCVa:327 siRNA stab0/0 Pal17 | GGUCUACGAGACCUCCAGG UCUCGUAGACC | 913 |
| 35242 | HCVa:327 siRNA stab0/0 Pal18 | GGUCUACGAGACCUCCAGG UCUCGUAGACCTT | 914 |
| 35243 | HCVa:327 siRNA stab0/0 Pal19 | GGUCUACGAGACCUCGAGG UCUCGUAGACC | 915 |
| 35244 | HCVa:327 siRNA stab0/0 Pal20 | GGUCUACGAGACCUCGAGG UCUCGUAGACCTT | 916 |
| 35245 | HCVa:327 siRNA stab0/0 Pal21 | GGUCUACGAGACCUGCAGG UCUCGUAGACC | 917 |
| 35246 | HCVa:327 siRNA stab0/0 Pal22 | GGUCUACGAGACCUGCAGG UCUCGUAGACCTT | 918 |
| 35247 | HCVa:304 siRNA stab0/0 Pal01 | GACUAUCCCACGAACGCUC GAGCGUUCGUGGGAUAGUCTT | 919 |
| 35248 | HCVa:304 siRNA stab0/0 Pal02 | GACUAUCCCACGAACGCUC GAGCGUUCGUGGGAUAGUC | 920 |
| 35249 | HCVa:304 siRNA stab0/0 Pal03 | GACUAUCCCACGAACGCGU UCGUGGGAUAGUCTT | 921 |
| 35250 | HCVa:304 siRNA stab0/0 Pal04 | GACUAUCCCACGAACGCGU UCGUGGGAUAGUC | 922 |
| 35251 | HCVa:304 siRNA stab0/0 Pal05 | GACUAUCCCACGAACGUUC GUGGGAUAGUCTT | 923 |
| 35252 | HCVa:304 siRNA stab0/0 Pal06 | GACUAUCCCACGAACGUUC GUGGGAUAGUC | 924 |
| 35253 | HCVa:304 siRNA stab0/0 Pal07 | ACUAUCCCACGAACGUUC GUGGGAUAGUTT | 925 |
| 35254 | HCVa:304 siRNA stab0/0 Pal08 | ACUAUCCCACGAACGUUC GUGGGA | 926 |
| 35295 | Luc3/rLuc bf-1a siRNA [Luc3:98L19 (80C) −6 + | UAUCUCUUCAUAGCCUUAUUGGUAUGGGCAAA | 927 |
| | rLuc:231U19] | | |
| 35296 | Luc3/rLuc bf-2a siRNA [Luc3:1562L19 (1544C) −3 + | UCGUCCACAAACACAACUCUUCUUAUUUAUGGCGA | 928 |
| | rLuc:165U19] | | |
| 35297 | Luc3/rLuc bf-3a siRNA [Luc3:1306L19 (1288C) −5 + | CAACGAUGAAGAAGUGUUCUUGAUUCAUUUAUU | 929 |
| | rLuc:84U19] | | |
| 35298 | Luc3/rLuc bf-4a siRNA [Luc3:286L19 (268C) −5 + | ACGCGCCCAACACCGGCAUUUCAUUAUAGCUAU | 930 |
| | rLuc:375U19] | | |
| 35299 | Luc3/rLuc bf-5a siRNA [Luc3:98L19 (80C) + rLuc:84U19] | UAUCUCUUCAUAGCCUUAU UGUUCUUGAUUCAUUUAUU | 931 |
| 35300 | Luc3/rLuc bf-6a siRNA [Luc3:98L19 (80C) −4 + | UAUCUCUUCAUAGCCUU UUCUUGAUUCAUUUAUU | 932 |
| | rLuc:84U19] | | |
| 35301 | Luc3/rLuc bf-7a siRNA [Luc3:98L19 (80C) + rLuc:375U19] | UAUCUCUUCAUAGCCUUAU GGCAUUUCAUUAUAGCUAU | 933 |
| 35302 | Luc3/rLuc bf-8a siRNA [Luc3:1562L19 (1544C) + | UCGUCCACAAACACAACUC UGUUCUUGAUUCAUUUAUU | 934 |
| | rLuc:84U19] | | |
| 35303 | Luc3/rLuc bf-9a siRNA [Luc3:1562L19 (1544C) −4 + | UCGUCCACAAACACAAC UUCUUGAUUCAUUUAUU | 935 |
| | rLuc:84U19] | | |
| 35304 | Luc3/rLuc bf-10a siRNA [Luc3:1562L19 (1544C) + | UCGUCCACAAACACAACUC GGCAUUUCAUUAUAGCUAU | 936 |
| | rLuc:375U19] | | |
| 35305 | Luc3/rLuc bf-1b siRNA [rLuc:249L19 (231C) −6 + | UUUGCCCAUACCAAUAAGGCUAUGAAGAGAUA | 937 |
| | Luc3:80U19] | | |
| 35306 | Luc3/rLuc bf-2b siRNA [rLuc:183L19 (165C) −3 + | UCGCCAUAAAUAAGAAGAGUUGUGUUUGUGGACGA | 938 |
| | Luc3:1544U19] | | |
| 35307 | Luc3/rLuc bf-3b siRNA [rLuc:102L19 (84C)-5 + | AAUAAAUGAAUCAAGAACACUUCUUCAUCGUUG | 939 |
| | Luc3:1288U19] | | |
| 35308 | Luc3/rLuc bf-4b siRNA [rLuc:393L19 (375C)-5 + | AUAGCUAUAAUGAAAUGCCGGUGUUGGGCGCGU | 940 |
| | Luc3:268U19] | | |
| 35309 | Luc3/rLuc bf-5b siRNA [rLuc:102L19 (84C) + Luc3:80U19] | AAUAAAUGAAUCAAGAACA AUAAGGCUAUGAAGAGAUA | 941 |
| 35310 | Luc3/rLuc bf-6b siRNA [rLuc:102L19 (84C)-4 + | AAUAAAUGAAUCAAGAA AAGGCUAUGAAGAGAUA | 942 |
| | Luc3:80U19] | | |
| 35311 | Luc3/rLuc bf-7b siRNA [rLuc:393L19 (375C) + | AUAGCUAUAAUGAAAUGCC AUAAGGCUAUGAAGAGAUA | 943 |
| | Luc3:80U19] | | |
| 35312 | Luc3/rLuc bf-8b siRNA [rLuc:102L19 (84C) + | AAUAAAUGAAUCAAGAACA GAGUUGUGUUUGUGGACGA | 944 |
| | Luc3:1544U19] | | |
| 35313 | Luc3/rLuc bf-9b siRNA [rLuc:102L19 (84C)-4 + | AAUAAAUGAAUCAAGAA GUUGUGUUUGUGGACGA | 945 |
| | Luc3:1544U19] | | |
| 35314 | Luc3/rLuc bf-10b siRNA [rLuc:393L19 (375C) + | AUAGCUAUAAUGAAAUGCC GAGUUGUGUUUGUGGACGA | 946 |
| | Luc3:1544U19] | | |
| 35913 | PRKCA:1143U21 siRNA stab00 | GGAUGUGGUGAUUCAGGAUTT | 947 |
| 36002 | VEGF:162U21 siRNA stab00 (sense) | CCUCUUCUUUUUUCUUAAATT | 948 |
| 36003 | VEGF:163U21 siRNA stab00 (sense) | CUCUUCUUUUUUCUUAAACTT | 949 |
| 36004 | VEGF:164U21 siRNA stab00 (sense) | UCUUCUUUUUUCUUAAACATT | 950 |
| 36005 | VEGF:166U21 siRNA stab00 (sense) | UUCUUUUUUCUUAAACAUUTT | 951 |
| 36006 | VEGF:169U21 siRNA stab00 (sense) | UUUUUUCUUAAACAUUUUUTT | 952 |
| 36007 | VEGF:171U21 siRNA stab00 (sense) | UUUUCUUAAACAUUUUUUUTT | 953 |
| 36008 | VEGF:172U21 siRNA stab00 (sense) | UUUCUUAAACAUUUUUUUUTT | 954 |
| 36009 | VEGF:181U21 siRNA stab00 (sense) | CAUUUUUUUUUAAAACUGUTT | 955 |
| 36010 | VEGF:187U21 siRNA stab00 (sense) | UUUUUAAAACUGUAUUGUUTT | 956 |
| 36011 | VEGF:188U21 siRNA stab00 (sense) | UUUUAAAACUGUAUUGUUUTT | 957 |
| 36012 | VEGF:192U21 siRNA stab00 (sense) | AAAACUGUAUUGUUUCUCGTT | 958 |
| 36013 | VEGF:202U21 siRNA stab00 (sense) | UGUUUCUCGUUUUAAUUUATT | 959 |
| 36014 | VEGF:220U21 siRNA stab00 (sense) | AUUUUUGCUUGCCAUUCCCTT | 960 |
| 36015 | VEGF:237U21 siRNA stab00 (sense) | CCCACUUGAAUCGGGCCGATT | 961 |
| 36016 | VEGF:238U21 siRNA stab00 (sense) | CCACUUGAAUCGGGCCGACTT | 962 |
| 36017 | VEGF:338U21 siRNA stab00 (sense) | CCAGAGAGAAGUCGAGGAATT | 963 |
| 36018 | VEGF:339U21 siRNA stab00 (sense) | CAGAGAGAAGUCGAGGAAGTT | 964 |
| 36019 | VEGF:371U21 siRNA stab00 (sense) | CAGAGAGAGCGCGCGGGCGTT | 965 |
| 36020 | VEGF:484U21 siRNA stab00 (sense) | AGCUGACCAGUCGCGCUGATT | 966 |
| 36021 | VEGF:598U21 siRNA stab00 (sense) | CCGGAGCCCGCGCCCGGAGTT | 967 |
| 36022 | VEGF:599U21 siRNA stab00 (sense) | CGGAGCCCGCGCCCGGAGGTT | 968 |
| 36023 | VEGF:600U21 siRNA stab00 (sense) | GGAGCCCGCGCCCGGAGGCTT | 969 |
| 36024 | VEGF:652U21 siRNA stab00 (sense) | CUGAAACUUUUCGUCCAACTT | 970 |
| 36025 | VEGF:653U21 siRNA stab00 (sense) | UGAAACUUUUCGUCCAACUTT | 971 |
| 36026 | VEGF:654U21 siRNA stab00 (sense) | GAAACUUUUCGUCCAACUUTT | 972 |
| 36027 | VEGF:658U21 siRNA stab00 (sense) | CUUUUCGUCCAACUUCUGGTT | 973 |
| 36028 | VEGF:672U21 siRNA stab00 (sense) | UCUGGGCUGUUCUCGCUUCTT | 974 |
| 36029 | VEGF:674U21 siRNA stab00 (sense) | UGGGCUGUUCUCGCUUCGGTT | 975 |
| 36030 | VEGF:691U21 siRNA stab00 (sense) | GGAGGAGCCGUGGUCCGCGTT | 976 |
| 36031 | VEGF:692U21 siRNA stab00 (sense) | GAGGAGCCGUGGUCCGCGCTT | 977 |
| 36032 | VEGF:758U21 siRNA stab00 (sense) | GGGAGGAGCCGCAGCCGGATT | 978 |
| 36033 | VEGF:759U21 siRNA stab00 (sense) | GGAGGAGCCGCAGCCGGAGTT | 979 |
| 36034 | VEGF:760U21 siRNA stab00 (sense) | GAGGAGCCGCAGCCGGAGGTT | 980 |
| 36035 | VEGF:795U21 siRNA stab00 (sense) | AGAGAAGGAAGAGGAGAGGTT | 981 |
| 36036 | VEGF:886U21 siRNA stab00 (sense) | GCUCCAGCCGCGCGCGCUCTT | 982 |
| 36037 | VEGF:977U21 siRNA stab00 (sense) | CCCACAGCCCGAGCCGGAGTT | 983 |
| 36038 | VEGF:978U21 siRNA stab00 (sense) | CCACAGCCCGAGCCGGAGATT | 984 |
| 36039 | VEGF:1038U21 siRNA stab00 (sense) | CAUGAACUUUCUGCUGUCUTT | 985 |
| 36040 | VEGF:1043U21 siRNA stab00 (sense) | ACUUUCUGCUGUCUUGGGUTT | 986 |
| 36041 | VEGF:1049U21 siRNA stab00 (sense) | UGCUGUCUUGGGUGCAUUGTT | 987 |
| 36042 | VEGF:1061U21 siRNA stab00 (sense) | UGCAUUGGAGCCUUGCCUUTT | 988 |
| 36043 | VEGF:1072U21 siRNA stab00 (sense) | CUUGCCUUGCUGCUCUACCTT | 989 |
| 36044 | VEGF:1088U21 siRNA stab00 (sense) | ACCUCCACCAUGCCAAGUGTT | 990 |
| 36045 | VEGF:1089U21 siRNA stab00 (sense) | CCUCCACCAUGCCAAGUGGTT | 991 |
| 36046 | VEGF:1095U21 siRNA stab00 (sense) | CCAUGCCAAGUGGUCCCAGTT | 992 |
| 36047 | VEGF:1110U21 siRNA stab00 (sense) | CCAGGCUGCACCCAUGGCATT | 993 |
| 36048 | VEGF:1175U21 siRNA stab00 (sense) | UCUAUCAGCGCAGCUACUGTT | 994 |
| 36049 | VEGF:1220U21 siRNA stab00 (sense) | UCUUCCAGGAGUACCCUGATT | 995 |
| 36050 | VEGF:1253U21 siRNA stab00 (sense) | UCUUCAAGCCAUCCUGUGUTT | 996 |
| 36051 | VEGF:1300U21 siRNA stab00 (sense) | AAUGACGAGGGCCUGGAGUTT | 997 |
| 36052 | VEGF:1309U21 siRNA stab00 (sense) | GGCCUGGAGUGUGUGCCCATT | 998 |
| 36053 | VEGF:1326U21 siRNA stab00 (sense) | CACUGAGGAGUCCAACAUCTT | 999 |
| 36054 | VEGF:1338U21 siRNA stab00 (sense) | CAACAUCACCAUGCAGAUUTT | 1000 |
| 36055 | VEGF:1342U21 siRNA stab00 (sense) | AUCACCAUGCAGAUUAUGCTT | 1001 |
| 36056 | VEGF:1351U21 siRNA stab00 (sense) | CAGAUUAUGCGGAUCAAACTT | 1002 |
| 36057 | VEGF:1352U21 siRNA stab00 (sense) | AGAUUAUGCGGAUCAAACCTT | 1003 |
| 36058 | VEGF:1353U21 siRNA stab00 (sense) | GAUUAUGCGGAUCAAACCUTT | 1004 |
| 36059 | VEGF:1389U21 siRNA stab00 (sense) | AGGAGAGAUGAGCUUCCUATT | 1005 |
| 36060 | VEGF:1398U21 siRNA stab00 (sense) | GAGCUUCCUACAGCACAACTT | 1006 |
| 36061 | VEGF:1401U21 siRNA stab00 (sense) | CUUCCUACAGCACAACAAATT | 1007 |
| 36062 | VEGF:1407U21 siRNA stab00 (sense) | ACAGCACAACAAAUGUGAATT | 1008 |
| 36063 | VEGF:1408U21 siRNA stab00 (sense) | CAGCACAACAAAUGUGAAUTT | 1009 |
| 36064 | VEGF:1417U21 siRNA stab00 (sense) | AAAUGUGAAUGCAGACCAATT | 1010 |
| 36065 | VEGF:180L21 siRNA (162C) stab00 (antisense) | UUUAAGAAAAAAGAAGAGGTT | 1011 |
| 36066 | VEGF:181L21 siRNA (163C) stab00 (antisense) | GUUUAAGAAAAAAGAAGAGTT | 1012 |
| 36067 | VEGF:182L21 siRNA (164C) stab00 (antisense) | UGUUUAAGAAAAAAGAAGATT | 1013 |
| 36068 | VEGF:184L21 siRNA (166C) stab00 (antisense) | AAUGUUUAAGAAAAAAGAATT | 1014 |
| 36069 | VEGF:187L21 siRNA (169C) stab00 (antisense) | AAAAAUGUUUAAGAAAAAATT | 1015 |
| 36070 | VEGF:189L21 siRNA (171C) stab00 (antisense) | AAAAAAAUGUUUAAGAAAATT | 1016 |
| 36071 | VEGF:190L21 siRNA (172C) stab00 (antisense) | AAAAAAAAUGUUUAAGAAATT | 1017 |
| 36072 | VEGF:199L21 siRNA (181C) stab00 (antisense) | ACAGUUUUAAAAAAAAAUGTT | 1018 |
| 36073 | VEGF:205L21 siRNA (187C) stab00 (antisense) | AACAAUACAGUUUUAAAAATT | 1019 |
| 36074 | VEGF:206L21 siRNA (188C) stab00 (antisense) | AAACAAUACAGUUUUAAAATT | 1020 |
| 36075 | VEGF:210L21 siRNA (192C) stab00 (antisense) | CGAGAAACAAUACAGUUUUTT | 1021 |
| 36076 | VEGF:220L21 siRNA (202C) stab00 (antisense) | UAAAUUAAAACGAGAAACATT | 1022 |
| 36077 | VEGF:238L21 siRNA (220C) stab00 (antisense) | GGGAAUGGCAAGCAAAAAUTT | 1023 |
| 36078 | VEGF:255L21 siRNA (237C) stab00 (antisense) | UCGGCCCGAUUCAAGUGGGTT | 1024 |
| 36079 | VEGF:256L21 siRNA (238C) stab00 (antisense) | GUCGGCCCGAUUCAAGUGGTT | 1025 |
| 36080 | VEGF:356L21 siRNA (338C) stab00 (antisense) | UUCCUCGACUUCUCUCUGGTT | 1026 |
| 36081 | VEGF:357L21 siRNA (339C) stab00 (antisense) | CUUCCUCGACUUCUCUCUGTT | 1027 |
| 36082 | VEGF:389L21 siRNA (371C) stab00 (antisense) | CGCCCGCGCGCUCUCUCUGTT | 1028 |
| 36083 | VEGF:502L21 siRNA (484C) stab00 (antisense) | UCAGCGCGACUGGUCAGCUTT | 1029 |
| 36084 | VEGF:616L21 siRNA (598C) stab00 (antisense) | CUCCGGGCGCGGGCUCCGGTT | 1030 |
| 36085 | VEGF:617L21 siRNA (599C) stab00 (antisense) | CCUCCGGGCGCGGGCUCCGTT | 1031 |
| 36086 | VEGF:618L21 siRNA (600C) stab00 (antisense) | GCCUCCGGGCGCGGGCUCCTT | 1032 |
| 36087 | VEGF:670L21 siRNA (652C) stab00 (antisense) | GUUGGACGAAAAGUUUCAGTT | 1033 |
| 36088 | VEGF:671L21 siRNA (653C) stab00 (antisense) | AGUUGGACGAAAAGUUUCATT | 1034 |
| 36089 | VEGF:672L21 siRNA (654C) stab00 (antisense) | AAGUUGGACGAAAAGUUUCTT | 1035 |
| 36090 | VEGF:676L21 siRNA (658C) stab00 (antisense) | CCAGAAGUUGGACGAAAAGTT | 1036 |
| 36091 | VEGF:690L21 siRNA (672C) stab00 (antisense) | GAAGCGAGAACAGCCCAGATT | 1037 |
| 36092 | VEGF:692L21 siRNA (674C) stab00 (antisense) | CCGAAGCGAGAACAGCCCATT | 1038 |
| 36093 | VEGF:709L21 siRNA (691C) stab00 (antisense) | CGCGGACCACGGCUCCUCCTT | 1039 |
| 36094 | VEGF:710L21 siRNA (692C) stab00 (antisense) | GCGCGGACCACGGCUCCUCTT | 1040 |
| 36095 | VEGF:776L21 siRNA (758C) stab00 (antisense) | UCCGGCUGCGGCUCCUCCCTT | 1041 |
| 36096 | VEGF:777L21 siRNA (759C) stab00 (antisense) | CUCCGGCUGCGGCUCCUCCTT | 1042 |
| 36097 | VEGF:778L21 siRNA (760C) stab00 (antisense) | CCUCCGGCUGCGGCUCCUCTT | 1043 |
| 36098 | VEGF:813L21 siRNA (795C) stab00 (antisense) | CCUCUCCUCUUCCUUCUCUTT | 1044 |
| 36099 | VEGF:904L21 siRNA (886C) stab00 (antisense) | GAGCGCGCGCGGCUGGAGCTT | 1045 |
| 36100 | VEGF:995L21 siRNA (977C) stab00 (antisense) | CUCCGGCUCGGGCUGUGGGTT | 1046 |
| 36101 | VEGF:996L21 siRNA (978C) stab00 (antisense) | UCUCCGGCUCGGGCUGUGGTT | 1047 |
| 36102 | VEGF:1056L21 siRNA (1038C) stab00 (antisense) | AGACAGCAGAAAGUUCAUGTT | 1048 |
| 36103 | VEGF:1061L21 siRNA (1043C) stab00 (antisense) | ACCCAAGACAGCAGAAAGUTT | 1049 |
| 36104 | VEGF:1067L21 siRNA (1049C) stab00 (antisense) | CAAUGCACCCAAGACAGCATT | 1050 |
| 36105 | VEGF:1079L21 siRNA (1061C) stab00 (antisense) | AAGGCAAGGCUCCAAUGCATT | 1051 |
| 36106 | VEGF:1090L21 siRNA (1072C) stab00 (antisense) | GGUAGAGCAGCAAGGCAAGTT | 1052 |
| 36107 | VEGF:1106L21 siRNA (1088C) stab00 (antisense) | CACUUGGCAUGGUGGAGGUTT | 1053 |
| 36108 | VEGF:1107L21 siRNA (1089C) stab00 (antisense) | CCACUUGGCAUGGUGGAGGTT | 1054 |
| 36109 | VEGF:1113L21 siRNA (1095C) stab00 (antisense) | CUGGGACCACUUGGCAUGGTT | 1055 |
| 36110 | VEGF:1128L21 siRNA (1110C) stab00 (antisense) | UGCCAUGGGUGCAGCCUGGTT | 1056 |
| 36111 | VEGF:1193L21 siRNA (1175C) stab00 (antisense) | CAGUAGCUGCGCUGAUAGATT | 1057 |
| 36112 | VEGF:1238L21 siRNA (1220C) stab00 (antisense) | UCAGGGUACUCCUGGAAGATT | 1058 |
| 36113 | VEGF:1271L21 siRNA (1253C) stab00 (antisense) | ACACAGGAUGGCUUGAAGATT | 1059 |
| 36114 | VEGF:1318L21 siRNA (1300C) stab00 (antisense) | ACUCCAGGCCCUCGUCAUUTT | 1060 |
| 36115 | VEGF:1327L21 siRNA (1309C) stab00 (antisense) | UGGGCACACACUCCAGGCCTT | 1061 |
| 36116 | VEGF:1344L21 siRNA (1326C) stab00 (antisense) | GAUGUUGGACUCCUCAGUGTT | 1062 |
| 36117 | VEGF:1356L21 siRNA (1338C) stab00 (antisense) | AAUCUGCAUGGUGAUGUUGTT | 1063 |
| 36118 | VEGF:1360L21 siRNA (1342C) stab00 (antisense) | GCAUAAUCUGCAUGGUGAUTT | 1064 |
| 36119 | VEGF:1369L21 siRNA (1351C) stab00 (antisense) | GUUUGAUCCGCAUAAUCUGTT | 1065 |
| 36120 | VEGF:1370L21 siRNA (1352C) stab00 (antisense) | GGUUUGAUCCGCAUAAUCUTT | 1066 |
| 36121 | VEGF:1371L21 siRNA (1353C) stab00 (antisense) | AGGUUUGAUCCGCAUAAUCTT | 1067 |
| 36122 | VEGF:1407L21 siRNA (1389C) stab00 (antisense) | UAGGAAGCUCAUCUCUCCUTT | 1068 |
| 36123 | VEGF:1416L21 siRNA (1398C) stab00 (antisense) | GUUGUGCUGUAGGAAGCUCTT | 1069 |
| 36124 | VEGF:1419L21 siRNA (1401C) stab00 (antisense) | UUUGUUGUGCUGUAGGAAGTT | 1070 |
| 36125 | VEGF:1425L21 siRNA (1407C) stab00 (antisense) | UUCACAUUUGUUGUGCUGUTT | 1071 |
| 36126 | VEGF:1426L21 siRNA (1408C) stab00 (antisense) | AUUCACAUUUGUUGUGCUGTT | 1072 |
| 36127 | VEGF:1435L21 siRNA (1417C) stab00 (antisense) | UUGGUCUGCAUUCACAUUUTT | 1073 |
| 36408 | bf-L-03 siRNA stab00 [VEGF:1215U21 o18S | GGACAUCUUCCAGGAGUACTT X GAACUGAGUUUAAAAGGCATT | 1074 |
| | FLT1:346U21] | | |
| 36409 | bf-L-02 siRNA stab00 [VEGF:1421U21 o18S | GUGAAUGCAGACCAAAGAATT X GAACUGAGUUUAAAAGGCATT | 1075 |
| | FLT1:346U21] | | |
| 36410 | bf-L-23 siRNA stab00 [HBV:1583U21 o18S HBV:263U21] | GCACUUCGCUUCACCUCUGTT X GGACUUCUCUCAAUUUUCUTT | 1076 |
| 36411 | bf-L-04 siRNA stab00 [KDR:3854U21 o18S FLT1:346U21] | UGAGCAUGGAAGAGGAUUCTT X GAACUGAGUUUAAAAGGCATT | 1077 |
| 36412 | bf-L-12 siRNA stab00 [Luc3:468U21 o18S Luc3:80U21] | GGAUUACCAGGGAUUUCAGTT X AUAAGGCUAUGAAGAGAUATT | 1078 |
| 36413 | bf-L-10 siRNA stab00 [Luc3:1544U21 o18S Luc3:80U21] | GAGUUGUGUUUGUGGACGATT X AUAAGGCUAUGAAGAGAUATT | 1079 |
| 36414 | bf-L-21 siRNA stab00 [HCVa:327U21 o18S | CCGGGAGGUCUCGUAGACCTT X GCGAAAGGCCUUGUGGUACTT | 1080 |
| | HCVa:282U21] | | |
| 36415 | bf-L-22 siRNA stab00 [HCVa:327U21 o18S | CCGGGAGGUCUCGUAGACCTT X AUAGGGUGCUUGCGAGUGCTT | 1081 |
| | HCVa:307U21] | | |
| 36416 | bf-L-01 siRNA stab00 [FLT1:346U21 o18S | GAACUGAGUUUAAAAGGCATT X GUGAAUGCAGACCAAAGAATT | 1082 |
| | VEGF:1421U21] | | |
| 36417 | bf-L-15 siRNA stab00 [Luc3:1478U21 o18S Luc3:80U21] | UGACGGAAAAAGAGAUCGUTT X AUAAGGCUAUGAAGAGAUATT | 1083 |
| 36418 | bf-L-16 siRNA stab00 [Luc3:1478U21 c12S Luc3:80U21] | UGACGGAAAAAGAGAUCGUTT W AUAAGGCUAUGAAGAGAUATT | 1084 |
| 36419 | bf-L-17 siRNA stab00 [Luc3:1478U21o9S Luc3:80U21] | UGACGGAAAAAGAGAUCGUTT Y AUAAGGCUAUGAAGAGAUATT | 1085 |
| 36420 | bf-L-18 siRNA stab00 [Luc3:1478U21 c3S Luc3:80U21] | UGACGGAAAAAGAGAUCGUTT Z AUAAGGCUAUGAAGAGAUATT | 1086 |
| 36421 | bf-L-19 siRNA stab00 [Luc3:1478U21 2x o18S | UGACGGAAAAAGAGAUCGUTT XX AUAAGGCUAUGAAGAGAUATT | 1087 |
| | Luc3:80U21] | | |
| 36422 | bf-L-13 siRNA stab00 [Luc3:80U21 o18S Luc3:1478U21] | AUAAGGCUAUGAAGAGAUATT X UGACGGAAAAAGAGAUCGUTT | 1088 |
| 36423 | bf-L-14 siRNA stab00 [Luc3:237U21 o18S Luc3:1478U21] | CGUAUGCAGUGAAAACUCUTT X UGACGGAAAAAGAGAUCGUTT | 1089 |
| 36424 | bf-L-11 siRNA stab00 [Luc3:237U21 o18S Luc3:80U21] | CGUAUGCAGUGAAAACUCUTT X AUAAGGCUAUGAAGAGAUATT | 1090 |
| 36425 | bf-L-05 siRNA stab00 [FLT1:3646U21 o18S | AUGCUGGACUGCUGGCACATT X GUGAAUGCAGACCAAAGAATT | 1091 |
| | VEGF:1421U21] | | |
| 36426 | bf-L-06 siRNA stab00 [FLT1:3646U21 c12S | AUGCUGGACUGCUGGCACATT W GUGAAUGCAGACCAAAGAATT | 1092 |
| | VEGF:1421U21] | | |
| 36427 | bf-L-07 siRNA stab00 [FLT1:3646U21 o9S | AUGCUGGACUGCUGGCACATT Y GUGAAUGCAGACCAAAGAATT | 1093 |
| | VEGF:1421U21] | | |
| 36428 | bf-L-08 siRNA stab00 [FLT1:3646U21 c3S | AUGCUGGACUGCUGGCACATT Z GUGAAUGCAGACCAAAGAATT | 1094 |
| | VEGF:1421U21] | | |
| 36429 | bf-L-09 siRNA stab00 [FLT1:3646U21 2x o18S | AUGCUGGACUGCUGGCACATT XX GUGAAUGCAGACCAAAGAATT | 1095 |
| | VEGF:1421U21] | | |
| 36430 | bf-L-20 siRNA stab00 [HCVa:307U21 o18S | AUAGGGUGCUUGCGAGUGCTT X GCGAAAGGCCUUGUGGUACTT | 1096 |
| | HCVa:282U21] | | |
| 36431 | FLT1:346U21 siRNA stab00 (sense) | GAACUGAGUUUAAAAGGCATT | 1097 |
| 36432 | Luc3:80U21 siRNA stab00 (sense) | AUAAGGCUAUGAAGAGAUATT | 1098 |
| 36433 | Luc3:1478U21 siRNA stab00 (sense) | UGACGGAAAAAGAGAUCGUTT | 1099 |
| 36434 | Luc3:1544U21 siRNA stab00 (sense) | GAGUUGUGUUUGUGGACGATT | 1100 |
| 36435 | Luc3:237U21 siRNA stab00 (sense) | CGUAUGCAGUGAAAACUCUTT | 1101 |
| 36436 | Luc3:468U21 siRNA stab00 (sense) | GGAUUACCAGGGAUUUCAGTT | 1102 |
| 36437 | HCVa:282U21 siRNA stab00 (sense) | GCGAAAGGCCUUGUGGUACTT | 1103 |
| 36438 | HCVa:307U21 siRNA stab00 (sense) | AUAGGGUGCUUGCGAGUGCTT | 1104 |
| 36439 | FLT1:364L21 siRNA (346C) stab00 (antisense) | UGCCUUUUAAACUCAGUUCTT | 1105 |
| 36440 | Luc3:98L21 siRNA (80C) stab00 (antisense) | UAUCUCUUCAUAGCCUUAUTT | 1106 |
| 36441 | Luc3:1496L21 siRNA (1478C) stab00 (antisense) | ACGAUCUCUUUUUCCGUCATT | 1107 |
| 36442 | Luc3:1562L21 siRNA (1544C) stab00 (antisense) | UCGUCCACAAACACAACUCTT | 1108 |
| 36443 | Luc3:255L21 siRNA (237C) stab00 (antisense) | AGAGUUUUCACUGCAUACGTT | 1109 |
| 36444 | Luc3:486L21 siRNA (468C) stab00 (antisense) | CUGAAAUCCCUGGUAAUCCTT | 1110 |
| 36445 | HCVa:300L21 siRNA (282C) stab00 (antisense) | GUACCACAAGGCCUUUCGCTT | 1111 |
| 36446 | HCVa:325L21 siRNA (307C) stab00 (antisense) | GCACUCGCAAGCACCCUAUTT | 1112 |
| 36447 | HCVa:345L21 siRNA (327C) stab00 (antisense) | GGUCUACGAGACCUCCCGGTT | 1113 |

UPPER CASE = ribonucleotide
UPPER CASE UNDERLINE = 2′-O-methyl nucleotide
Lowercase = 2′-deoxy-2′-fluoro nucleotide
T = thymidine
T = inverted thymidine
t = 3′-deoxy thymidine
B = inverted deoxyabasic succinate linker
B = inverted deoxyabasic
X = universal base (5-nitroindole)
Z = universal base (3-nitropyrrole)
S = phosphorothioate internucleotide linkage
U = 5-bromodeoxyuridine
A = deoxyadenosine
G = deoxyguanosine
L = glyceryl moiety
ddC = dideoxy Cytidine
p = phosphate

TABLE II

| | | | | | |
|---|---|---|---|---|---|
| Reagent | Equivalents | Amount | Wait Time* DNA | Wait Time* 2′-O-methyl | Wait Time*RNA |

A. 2.5 μmol Synthesis Cycle ABI 394 Instrument

| | | | | | | | | |
|---|---|---|---|---|---|---|---|---|
| Phosphoramidites | 6.5 | 163 | μL | 45 sec | 2.5 | min | 7.5 | min |
| S-Ethyl Tetrazole | 23.8 | 238 | μL | 45 sec | 2.5 | min | 7.5 | min |
| Acetic Anhydride | 100 | 233 | μL | 5 sec | 5 | sec | 5 | sec |
| N-Methyl | 186 | 233 | μL | 5 sec | 5 | sec | 5 | sec |
| Imidazole | | | | | | | | |
| TCA | 176 | 2.3 | mL | 21 sec | 21 | sec | 21 | sec |
| Iodine | 11.2 | 1.7 | mL | 45 sec | 45 | sec | 45 | sec |
| Beaucage | 12.9 | 645 | μL | 100 sec | 300 | sec | 300 | sec |

| | | | | | | |
|---|---|---|---|---|---|---|
| Acetonitrile | NA | 6.67 | mL | NA | NA | NA |

B. 0.2 μmol Synthesis Cycle ABI 394 Instrument

| | | | | | | | | |
|---|---|---|---|---|---|---|---|---|
| Phosphoramidites | 15 | 31 | μL | 45 sec | 233 | sec | 465 | sec |
| S-Ethyl Tetrazole | 38.7 | 31 | μL | 45 sec | 233 | min | 465 | sec |
| Acetic Anhydride | 655 | 124 | μL | 5 sec | 5 | sec | 5 | sec |
| N-Methyl | 1245 | 124 | μL | 5 sec | 5 | sec | 5 | sec |
| Imidazole | | | | | | | | |
| TCA | 700 | 732 | μL | 10 sec | 10 | sec | 10 | sec |
| Iodine | 20.6 | 244 | μL | 15 sec | 15 | sec | 15 | sec |
| Beaucage | 7.7 | 232 | μL | 100 sec | 300 | sec | 300 | sec |

| | | | | | | |
|---|---|---|---|---|---|---|
| Acetonitrile | NA | 2.64 | mL | NA | NA | NA |

C. 0.2 μmol Synthesis Cycle 96 well Instrument

| | Equivalents: DNA/ | Amount: DNA/2′-O- | | | Wait Time* 2′-O- | | |
|---|---|---|---|---|---|---|---|
| Reagent | 2′-O-methyl/Ribo | methyl/Ribo | | Wait Time* DNA | methyl | | Wait Time* Ribo |
| Phosphoramidites | 22/33/66 | 40/60/120 | μL | 60 sec | 180 | sec | 360 sec |
| S-Ethyl Tetrazole | 70/105/210 | 40/60/120 | μL | 60 sec | 180 | min | 360 sec |
| Acetic Anhydride | 265/265/265 | 50/50/50 | μL | 10 sec | 10 | sec | 10 sec |
| N-Methyl | 502/502/502 | 50/50/50 | μL | 10 sec | 10 | sec | 10 sec |
| Imidazole | | | | | | | |
| TCA | 238/475/475 | 250/500/500 | μL | 15 sec | 15 | sec | 15 sec |
| Iodine | 6.8/6.8/6.8 | 80/80/80 | μL | 30 sec | 30 | sec | 30 sec |
| Beaucage | 34/51/51 | 80/120/120 | | 100 sec | 200 | sec | 200 sec |

| | | | | | | |
|---|---|---|---|---|---|---|
| Acetonitrile | NA | 1150/1150/1150 | μL | NA | NA | NA |

Wait time does not include contact time during delivery.
Tandem synthesis utilizes double coupling of linker molecule

TABLE III

| | | | Number | | | |
|---|---|---|---|---|---|---|
| | Solution on | Stock VEGF | of | Injectate | | Conc. |
| Group | Filter (1.0 μL) | concentration | Animals | (6.0 μL) | Dose | injectate |
| 1 | Tris-Cl pH 6.9 | NA | 5 | water | NA | NA |
| 2 | R&D Systems | 3.53 μg/μL | 5 | water | NA | NA |
| | VEGF-carrier | | | | | |
| | free | | | | | |
| | 75 μM | | | | | |
| 3 | R&D Systems | 3.53 μg/μL | 5 | Site 2340 | 10 μg/eye | 1.67 μg/μL |
| | VEGF-carrier | | | Stab1 | | |
| | free | | | siRNA | | |
| | 75 μM | | | | | |
| 4 | R&D Systems | 3.53 μg/μL | 5 | Site 2340 | 3 μg/eye | 0.5 μg/μL |
| | VEGF-carrier | | | Stab1 | | |
| | free | | | siRNA | | |
| | 75 μM | | | | | |
| 5 | R&D Systems | 3.53 μg/μL | 5 | Site 2340 | 1 μg/eye | 0.167 μg/μL |
| | VEGF-carrier | | | Stab1 | | |
| | free | | | siRNA | | |
| | 75 μM | | | | | |
| 6 | R&D Systems | 3.53 μg/μL | 5 | Inactive | 10 μg/eye | 1.67 μg/μL |
| | VEGF-carrier | | | Site 2340 | | |
| | free | | | Stab1 | | |
| | 75 μM | | | siRNA | | |
| 7 | R&D Systems | 3.53 μg/μL | 5 | Inactive | 3 μg/eye | 0.5 μg/μL |
| | VEGF-carrier | | | Site 2340 | | |
| | free | | | Stab1 | | |
| | 75 μM | | | siRNA | | |
| 8 | R&D Systems | 3.53 μg/μL | 5 | Inactive | 1 μg/eye | 0.167 μg/μL |
| | VEGF-carrier | | | Site 2340 | | |
| | free | | | Stab1 | | |
| | 75 μM | | | siRNA | | |

TABLE IV
Non-limiting examples of Stabilization Chemistries for
chemically modified siNA constructs

| Chemistry | pyrimidine | Purine | cap | p = S | Strand |
|---|---|---|---|---|---|
| “Stab 00” | Ribo | Ribo | TT at 3′-ends | | S/AS |
| “Stab 1” | Ribo | Ribo | — | 5 at 5′-end | S/AS |
| | | | | 1 at 3′-end | |
| “Stab 2” | Ribo | Ribo | — | All linkages | Usually AS |
| “Stab 3” | 2′-fluoro | Ribo | — | 4 at 5′-end | Usually S |
| | | | | 4 at 3′-end | |
| “Stab 4” | 2′-fluoro | Ribo | 5′ and 3′-ends | — | Usually S |
| “Stab 5” | 2′-fluoro | Ribo | — | 1 at 3′-end | Usually AS |
| “Stab 6” | 2′-O-Methyl | Ribo | 5′ and 3′- | — | Usually S |
| | | | ends | | |
| “Stab 7” | 2′-fluoro | 2′-deoxy | 5′ and 3′- | — | Usually S |
| | | | ends | | |
| “Stab 8” | 2′-fluoro | 2′-O-Methyl | — | 1 at 3′-end | Usually AS |
| “Stab 9” | Ribo | Ribo | 5′ and 3′- | — | Usually S |
| | | | ends | | |
| “Stab 10” | Ribo | Ribo | — | 1 at 3′-end | Usually AS |
| “Stab 11” | 2′-fluoro | 2′-deoxy | — | 1 at 3′-end | Usually AS |
| “Stab 12” | 2′-fluoro | LNA | 5′ and 3′- | | Usually S |
| | | | ends | | |
| “Stab 13” | 2′-fluoro | LNA | | 1 at 3′-end | Usually AS |
| “Stab 14” | 2′-fluoro | 2′-deoxy | | 2 at 5′-end | Usually AS |
| | | | | 1 at 3′-end | |
| “Stab 15” | 2′-deoxy | 2′-deoxy | | 2 at 5′-end | Usually AS |
| | | | | 1 at 3′-end | |
| “Stab 16” | Ribo | 2′-O- | 5′ and 3′- | | Usually S |
| | | Methyl | ends | | |
| “Stab 17” | 2′-O-Methyl | 2′-O- | 5′ and 3′- | | Usually S |
| | | Methyl | ends | | |
| “Stab 18” | 2′-fluoro | 2′-O- | 5′ and 3′- | | Usually S |
| | | Methyl | ends | | |
| “Stab 19” | 2′-fluoro | 2′-O- | 3′-end | | Usually AS |
| | | Methyl | | | |
| “Stab 20” | 2′-fluoro | 2′-deoxy | 3′-end | | Usually AS |
| “Stab 21” | 2′-fluoro | Ribo | 3′-end | | Usually AS |
| “Stab 22” | Ribo | Ribo | 3′-end | | Usually AS |
| “Stab 23” | 2′-fluoro* | 2′-deoxy* | 5′ and 3′- | | Usually S |
| | | | ends | | |
| “Stab 24” | 2′-fluoro* | 2′-O- | — | 1 at 3′-end | Usually AS |
| | | Methyl* | | | |
| “Stab 25” | 2′-fluoro* | 2′-O- | — | 1 at 3′-end | Usually AS |
| | | Methyl* | | | |

CAP = any terminal cap, see for example FIG. 10.
All Stab 1-25 chemistries can comprise 3′-terminal thymidine (TT) residues
All Stab 1-25 chemistries typically comprise about 21 nucleotides, but can vary as described herein.
S = sense strand
AS = antisense strand
*Stab 23 has single ribonucleotide adjacent to 3′-CAP
*Stab 24 has single ribonucleotide at 5′-terminus
*Stab 25 has three ribonucleotides at 5-terminus

TABLE V
Peptides for Conjugation

| | | |
|---|---|---|
| Peptide | Sequence | SEQ ID NO |

| | | |
|---|---|---|
| ANTENNAPEDIA | RQI KIW FQN RRM KWK K amide | 1114 |
| Kaposi fibroblast | AAV ALL PAV LLA LLA P + VQR KRQ | 1115 |
| growth factor | KLMP | |
| caiman crocodylus | MGL GLH LLV LAA ALQ GA | 1116 |
| Ig(5) light chain | | |
| HIVenvelope | GAL FLG FLG AAG STM GA + PKS | 1117 |
| glycoprotein gp41 | KRK 5 (NLS of the SV40) | |
| HIV-1 Tat | RKK RRQ RRR | 1118 |
| Influenza | GLFEAIAGFIENGWEGMIDGGGYC | 1119 |
| hemagglutinin envelop | | |
| glycoprotein | | |
| RGD peptide | X-RGD-X | 1120 |
| | where X is any amino acid or peptide | |
| transportan A | GWT LNS AGY LLG KIN LKA LAA | 1121 |
| | LAK KIL | |
| Somatostatin | (S)FC YWK TCT | 1122 |
| (tyr-3-octreotate) | | |
| Pre-S-peptide | (S)DH QLN PAF | 1123 |

(S) optional Serine for coupling
Italic = optional D isomer for stability

TABLE VI
Duplex half-lives in human and mouse serum and liver extracts

| | Stability | | | | | |
|---|---|---|---|---|---|---|
| | S/AS Sirna # | | | | | |
| | All RNA | 4*/5 | 4/5* | 7/11* | 7*/8 | 7/8* |
| | 47715/47933 | 30355/30366 | 30355/30366 | 30612/31175 | 30612/30620 | 30612/30620 |
| Human | 0.017 | 408 | 39 | 54 | 130 | 94 |
| Serum | | (0.96)^{†} | (0.65) | (0.76) | (0.88) | (0.86) |
| t_{1/2} hours | | | | | | |
| Human | 2.5 | 28.6 | 43.5 | 0.78/2.9^{‡} | 9 | 816 |
| Liver | | (0.40) | (0.66) | (0.45) | (0.39) | (0.99) |
| t_{1/2} hours | | | | | | |
| Mouse | 1.17 | 16.7 | 10 | 2.3 | 16.6 | 35.7 |
| Serum | | (0.9) | (0.81) | | (0.46) | (0.69) |
| t_{1/2} hours | | | | | | |
| Mouse | 6 | 1.08 | 0.80 | 0.20 | 0.22 | 120 |
| Liver | | | | | | (0.89) |
| t_{1/2} hours | | | | | | |

*The asterisk designates the strand carrying the radiolabel in the duplex.
^{†}For longer half-lives the fraction full-length at the 18 hours is presented as the parenthetic lower number in each cell.
^{‡}A biphasic curve was observed, half-lives for both phases are shown.

TABLE VII
Single strand half-lives in human serum

| | Stability Sirna # | | | | |
|---|---|---|---|---|---|
| | 4 | 5 | 7 | 11 | 8 |
| | 30355 | 30366 | 30612 | 31175 | 30620 |
| Human serum | 22 | 16 | 13 | 19 | 28 |
| t_{1/2} hours | | | | | |
| Human liver | 0.92 | 0.40 | 0.43 | 0.27 | 192 |
| t_{1/2} hours | | | | | |

TABLE VIII
Human serum half-lives for Stab 4/5 duplex chemistry
with terminus chemistries of FIG. 22

Cap Chemistry

| | | | | | | | |
|---|---|---|---|---|---|---|---|
| 2 | 7 | 9 | 2 | 8 | 1 | 3 | 6 |
| (R═O) | (R═O) | (R═O) | (R═S) | (R═O) | (R═O) | (R═O) | (R═O) |
| (B═T) | (B═T) | (B═T) | (B═T) | (B═T) | (B═T) | (B═T) | (B═T) |

| | | | | | | | | |
|---|---|---|---|---|---|---|---|---|
| Human | 1 | 1.2 | 2.3 | 39 | 96 | 460 | 770 | 770 |
| Serum t_{1/2} | | | | | (0.69)^{‡} | (0.95) | (0.94) | (0.95) |
| hours | | | | | | | | |

The capping structures were in the following position of the 4:5 chemistry formatted sequence:
antisense strand-5′-uuGuuGuAuuuuGuGGuuG-CAP-3′ where CAP is 1, 2, 3, 6, 7, 8, or 9 from FIG. 22. (SEQ ID NO: 670)
sense strand 5′-CAP-cAAccAcAAAAuAcAAcAATT-CAP-3′ where CAP is 1 from FIG. 22. (SEQ ID NO: 671)
^{‡}For half-lives that extend beyond the time course sampled the fraction full-length is presented in parentheses.

What we claim is:

1-20. (canceled)

21. A chemically modified short interfering nucleic acid (siNA) molecule that inhibits expression of a target RNA, wherein:
a) the siNA comprises a sense strand and an antisense strand;
b) each strand is independently 18 to 24 nucleotides in length, and together comprise a duplex having between 17 and 23 base pairs;
c) the antisense strand is complementary to the target RNA sequence;
d) the sense strand has a cap at both 5′- and 3′-ends of the sense strand; and
e) pyrimidine nucleotides in the sense strand are pyrimidine ribonucleotides and purine nucleotides in the sense strand are 2′-O-methyl purine nucleotides.

22. The siNA molecule of claim 21, comprising a 3′-overhang on one or both strands.

23. The siNA molecule of claim 21, wherein pyrimidine nucleotides in the antisense strand are 2′-deoxy-2′-fluoro pyrimidine nucleotides and purine nucleotides present in the antisense strand are 2′-O-methyl purine nucleotides.

24. The siNA molecule of claim 23, wherein the antisense strand has a phosphorothioate internucleotide linkage at the 3′end.

25. The siNA molecule of claim 23, comprising three ribonucleotides at the 5′-terminus of the antisense strand.

26. A composition comprising the siNA molecule of claim 21 and a pharmaceutically acceptable carrier or diluent.

The application's sequence listing, which the Patent Office published only in electronic form, follows.

SEQUENCE LISTING (1157 sequences)

SEQ ID NO: 1 - RNA, 21 nt, Artificial Sequence
  Synthetic construct
  misc_feature (1)..(1): 5'-3 attached terminal deoxyabasic moiety
  misc_feature (21)..(21): 3'-3 attached terminal deoxyabasic moiety
uaaccucguacuggugccucc

SEQ ID NO: 2 - RNA, 21 nt, Artificial Sequence
  Synthetic construct
  misc_feature (1)..(1): 5'-3 attached terminal deoxyabasic moiety
  misc_feature (21)..(21): 3'-3 attached terminal deoxyabasic moiety
ggaggcaccaguacgagguua

SEQ ID NO: 3 - RNA, 21 nt, Artificial Sequence
  Synthetic construct
  misc_feature (1)..(1): 5'-3 attached terminal deoxyabasic moiety
  misc_feature (21)..(21): 3'-3 attached terminal deoxyabasic moiety
aaacuccaagauccccaauca

SEQ ID NO: 4 - RNA, 21 nt, Artificial Sequence
  Synthetic construct
  misc_feature (1)..(1): 5'-3 attached terminal deoxyabasic moiety
  misc_feature (21)..(21): 3'-3 attached terminal deoxyabasic moiety
ugauuggggaucuuggaguuu

SEQ ID NO: 5 - RNA, 21 nt, Artificial Sequence
  Synthetic construct
  misc_feature (1)..(1): 5'-3 attached terminal deoxyabasic moiety
  misc_feature (21)..(21): 3'-3 attached terminal deoxyabasic moiety
guuggagucuguaggacuugg

SEQ ID NO: 6 - RNA, 21 nt, Artificial Sequence
  Synthetic construct
  misc_feature (1)..(1): 5'-3 attached terminal deoxyabasic moiety
  misc_feature (21)..(21): 3'-3 attached terminal deoxyabasic moiety
ccaaguccuacagacuccaac

SEQ ID NO: 7 - RNA, 21 nt, Artificial Sequence
  Synthetic construct
  misc_feature (1)..(1): 5'-3 attached terminal deoxyabasic moiety
  misc_feature (21)..(21): 3'-3 attached terminal deoxyabasic moiety
gcaaaaacccugugauuuccu

SEQ ID NO: 8 - RNA, 21 nt, Artificial Sequence
  Synthetic construct
  misc_feature (1)..(1): 5'-3 attached terminal deoxyabasic moiety
  misc_feature (21)..(21): 3'-3 attached terminal deoxyabasic moiety
aggaaaucacaggguuuuugc

SEQ ID NO: 9 - RNA, 21 nt, Artificial Sequence
  Synthetic construct
  misc_feature (1)..(1): 5'-3 attached terminal deoxyabasic moiety
  misc_feature (21)..(21): 3'-3 attached terminal deoxyabasic moiety
uuggucaguuucuggcaguuc

SEQ ID NO: 10 - RNA, 21 nt, Artificial Sequence
  Synthetic construct
  misc_feature (1)..(1): 5'-3 attached terminal deoxyabasic moiety
  misc_feature (21)..(21): 3'-3 attached terminal deoxyabasic moiety
gaacugccagaaacugaccaa

SEQ ID NO: 11 - RNA, 21 nt, Artificial Sequence
  Synthetic construct
  misc_feature (1)..(1): 5'-3 attached terminal deoxyabasic moiety
  misc_feature (21)..(21): 3'-3 attached terminal deoxyabasic moiety
gguccuuucuuggaucaaccc

SEQ ID NO: 12 - RNA, 21 nt, Artificial Sequence
  Synthetic construct
  misc_feature (1)..(1): 5'-3 attached terminal deoxyabasic moiety
  misc_feature (21)..(21): 3'-3 attached terminal deoxyabasic moiety
ggguugauccaagaaaggacc

SEQ ID NO: 13 - RNA, 21 nt, Artificial Sequence
  Synthetic construct
  misc_feature (1)..(1): 5'-3 attached terminal deoxyabasic moiety
  misc_feature (21)..(21): 3'-3 attached terminal deoxyabasic moiety
uggacuucucucaauuuucua

SEQ ID NO: 14 - RNA, 21 nt, Artificial Sequence
  Synthetic construct
  misc_feature (1)..(1): 5'-3 attached terminal deoxyabasic moiety
  misc_feature (21)..(21): 3'-3 attached terminal deoxyabasic moiety
uagaaaauugagagaagucca

SEQ ID NO: 15 - RNA, 21 nt, Artificial Sequence
  Synthetic construct
  misc_feature (1)..(1): 5'-3 attached terminal deoxyabasic moiety
  misc_feature (21)..(21): 3'-3 attached terminal deoxyabasic moiety
uuuuucaccucugccuaauca

SEQ ID NO: 16 - RNA, 21 nt, Artificial Sequence
  Synthetic construct
  misc_feature (1)..(1): 5'-3 attached terminal deoxyabasic moiety
  misc_feature (21)..(21): 3'-3 attached terminal deoxyabasic moiety
ugauuaggcagaggugaaaaa

SEQ ID NO: 17 - RNA, 21 nt, Artificial Sequence
  Synthetic construct
  misc_feature (1)..(1): 5'-3 attached terminal deoxyabasic moiety
  misc_feature (21)..(21): 3'-3 attached terminal deoxyabasic moiety
caagccuccaagcugugccuu

SEQ ID NO: 18 - RNA, 21 nt, Artificial Sequence
  Synthetic construct
  misc_feature (1)..(1): 5'-3 attached terminal deoxyabasic moiety
  misc_feature (21)..(21): 3'-3 attached terminal deoxyabasic moiety
aaggcacagcuuggaggcuug

SEQ ID NO: 19 - RNA, 21 nt, Artificial Sequence
  Synthetic construct
  misc_feature (1)..(1): 5'-3 attached terminal deoxyabasic moiety
  misc_feature (21)..(21): 3'-3 attached terminal deoxyabasic moiety
uccauggugcucacugcggcu

SEQ ID NO: 20 - RNA, 21 nt, Artificial Sequence
  Synthetic construct
  misc_feature (1)..(1): 5'-3 attached terminal deoxyabasic moiety
  misc_feature (21)..(21): 3'-3 attached terminal deoxyabasic moiety
agccgcagugagcaccaugga

SEQ ID NO: 21 - RNA, 21 nt, Artificial Sequence
  Synthetic construct
  misc_feature (1)..(1): 5'-3 attached terminal deoxyabasic moiety
  misc_feature (21)..(21): 3'-3 attached terminal deoxyabasic moiety
agguaccacgagugacgccga

SEQ ID NO: 22 - RNA, 21 nt, Artificial Sequence
  Synthetic construct
  misc_feature (1)..(1): 5'-3 attached terminal deoxyabasic moiety
  misc_feature (21)..(21): 3'-3 attached terminal deoxyabasic moiety
ucggcgucacucgugguaccu

SEQ ID NO: 23 - RNA, 21 nt, Artificial Sequence
  Synthetic construct
  misc_feature (1)..(1): 5'-3 attached terminal deoxyabasic moiety
  misc_feature (21)..(21): 3'-3 attached terminal deoxyabasic moiety
ccuccguggucaugcuccaau

SEQ ID NO: 24 - RNA, 21 nt, Artificial Sequence
  Synthetic construct
  misc_feature (1)..(1): 5'-3 attached terminal deoxyabasic moiety
  misc_feature (21)..(21): 3'-3 attached terminal deoxyabasic moiety
auuggagcaugaccacggagg

SEQ ID NO: 25 - RNA, 21 nt, Artificial Sequence
  Synthetic construct
  misc_feature (1)..(1): 5'-3 attached terminal deoxyabasic moiety
  misc_feature (21)..(21): 3'-3 attached terminal deoxyabasic moiety
cccaacuagguucuuuccugg

SEQ ID NO: 26 - RNA, 21 nt, Artificial Sequence
  Synthetic construct
  misc_feature (1)..(1): 5'-3 attached terminal deoxyabasic moiety
  misc_feature (21)..(21): 3'-3 attached terminal deoxyabasic moiety
ccaggaaagaaccuaguuggg

SEQ ID NO: 27 - RNA, 23 nt, Artificial Sequence
  Synthetic construct
uaaccucguacuggugccuccuu

SEQ ID NO: 28 - RNA, 23 nt, Artificial Sequence
  Synthetic construct
ggaggcaccaguacgagguuauu

SEQ ID NO: 29 - RNA, 23 nt, Artificial Sequence
  Synthetic construct
aaacuccaagauccccaaucauu

SEQ ID NO: 30 - RNA, 23 nt, Artificial Sequence
  Synthetic construct
  misc_feature (1)..(1): 5'-3 attached terminal deoxyabasic moiety
  misc_feature (21)..(21): 3'-3 attached terminal deoxyabasic moiety
uaaccucguacuggugccuccuu

SEQ ID NO: 31 - RNA, 23 nt, Artificial Sequence
  Synthetic construct
  misc_feature (1)..(1): 5'-3 attached terminal deoxyabasic moiety
  misc_feature (21)..(21): 3'-3 attached terminal deoxyabasic moiety
ggaggcaccaguacgagguuauu

SEQ ID NO: 32 - RNA, 23 nt, Artificial Sequence
  Synthetic construct
  misc_feature (1)..(1): 5'-3 attached terminal deoxyabasic moiety
  misc_feature (21)..(21): 3'-3 attached terminal deoxyabasic moiety
aaacuccaagauccccaaucauu

SEQ ID NO: 33 - RNA, 23 nt, Artificial Sequence
  Synthetic construct
ugauuggggaucuuggaguuuuu

SEQ ID NO: 34 - RNA, 23 nt, Artificial Sequence
  Synthetic construct
guuggagucuguaggacuugguu

SEQ ID NO: 35 - RNA, 23 nt, Artificial Sequence
  Synthetic construct
ccaaguccuacagacuccaacuu

SEQ ID NO: 36 - RNA, 23 nt, Artificial Sequence
  Synthetic construct
  misc_feature (1)..(1): 5'-3 attached terminal deoxyabasic moiety
  misc_feature (21)..(21): 3'-3 attached terminal deoxyabasic moiety
ugauuggggaucuuggaguuuuu

SEQ ID NO: 37 - RNA, 23 nt, Artificial Sequence
  Synthetic construct
  misc_feature (1)..(1): 5'-3 attached terminal deoxyabasic moiety
  misc_feature (21)..(21): 3'-3 attached terminal deoxyabasic moiety
guuggagucuguaggacuugguu

SEQ ID NO: 38 - RNA, 23 nt, Artificial Sequence
  Synthetic construct
  misc_feature (1)..(1): 5'-3 attached terminal deoxyabasic moiety
  misc_feature (21)..(21): 3'-3 attached terminal deoxyabasic moiety
ccaaguccuacagacuccaacuu

SEQ ID NO: 39 - RNA, 23 nt, Artificial Sequence
  Synthetic construct
gcaaaaacccugugauuuccuuu

SEQ ID NO: 40 - RNA, 23 nt, Artificial Sequence
  Synthetic construct
aggaaaucacaggguuuuugcuu

SEQ ID NO: 41 - RNA, 23 nt, Artificial Sequence
  Synthetic construct
uuggucaguuucuggcaguucuu

SEQ ID NO: 42 - RNA, 23 nt, Artificial Sequence
  Synthetic construct
  misc_feature (1)..(1): 5'-3 attached terminal deoxyabasic moiety
  misc_feature (21)..(21): 3'-3 attached terminal deoxyabasic moiety
gcaaaaacccugugauuuccuuu

SEQ ID NO: 43 - RNA, 23 nt, Artificial Sequence
  Synthetic construct
  misc_feature (1)..(1): 5'-3 attached terminal deoxyabasic moiety
  misc_feature (21)..(21): 3'-3 attached terminal deoxyabasic moiety
aggaaaucacaggguuuuugcuu

SEQ ID NO: 44 - RNA, 23 nt, Artificial Sequence
  Synthetic construct
  misc_feature (1)..(1): 5'-3 attached terminal deoxyabasic moiety
  misc_feature (21)..(21): 3'-3 attached terminal deoxyabasic moiety
uuggucaguuucuggcaguucuu

SEQ ID NO: 45 - RNA, 23 nt, Artificial Sequence
  Synthetic construct
gaacugccagaaacugaccaauu

SEQ ID NO: 46 - RNA, 23 nt, Artificial Sequence
  Synthetic construct
gguccuuucuuggaucaacccuu

SEQ ID NO: 47 - RNA, 23 nt, Artificial Sequence
  Synthetic construct
ggguugauccaagaaaggaccuu

SEQ ID NO: 48 - RNA, 23 nt, Artificial Sequence
  Synthetic construct
  misc_feature (1)..(1): 5'-3 attached terminal deoxyabasic moiety
  misc_feature (21)..(21): 3'-3 attached terminal deoxyabasic moiety
gaacugccagaaacugaccaauu

SEQ ID NO: 49 - RNA, 23 nt, Artificial Sequence
  Synthetic construct
  misc_feature (1)..(1): 5'-3 attached terminal deoxyabasic moiety
  misc_feature (21)..(21): 3'-3 attached terminal deoxyabasic moiety
gguccuuucuuggaucaacccuu

SEQ ID NO: 50 - RNA, 23 nt, Artificial Sequence
  Synthetic construct
  misc_feature (1)..(1): 5'-3 attached terminal deoxyabasic moiety
  misc_feature (21)..(21): 3'-3 attached terminal deoxyabasic moiety
ggguugauccaagaaaggaccuu

SEQ ID NO: 51 - RNA, 23 nt, Artificial Sequence
  Synthetic construct
uggacuucucucaauuuucuauu

SEQ ID NO: 52 - RNA, 23 nt, Artificial Sequence
  Synthetic construct
uagaaaauugagagaaguccauu

SEQ ID NO: 53 - RNA, 23 nt, Artificial Sequence
  Synthetic construct
uuuuucaccucugccuaaucauu

SEQ ID NO: 54 - RNA, 23 nt, Artificial Sequence
  Synthetic construct
  misc_feature (1)..(1): 5'-3 attached terminal deoxyabasic moiety
  misc_feature (21)..(21): 3'-3 attached terminal deoxyabasic moiety
uggacuucucucaauuuucuauu

SEQ ID NO: 55 - RNA, 23 nt, Artificial Sequence
  Synthetic construct
  misc_feature (1)..(1): 5'-3 attached terminal deoxyabasic moiety
  misc_feature (21)..(21): 3'-3 attached terminal deoxyabasic moiety
uagaaaauugagagaaguccauu

SEQ ID NO: 56 - RNA, 23 nt, Artificial Sequence
  Synthetic construct
  misc_feature (1)..(1): 5'-3 attached terminal deoxyabasic moiety
  misc_feature (21)..(21): 3'-3 attached terminal deoxyabasic moiety
uuuuucaccucugccuaaucauu

SEQ ID NO: 57 - RNA, 23 nt, Artificial Sequence
  Synthetic construct
ugauuaggcagaggugaaaaauu

SEQ ID NO: 58 - RNA, 23 nt, Artificial Sequence
  Synthetic construct
caagccuccaagcugugccuuuu

SEQ ID NO: 59 - RNA, 23 nt, Artificial Sequence
  Synthetic construct
aaggcacagcuuggaggcuuguu

SEQ ID NO: 60 - RNA, 23 nt, Artificial Sequence
  Synthetic construct
  misc_feature (1)..(1): 5'-3 attached terminal deoxyabasic moiety
  misc_feature (21)..(21): 3'-3 attached terminal deoxyabasic moiety
ugauuaggcagaggugaaaaauu

SEQ ID NO: 61 - RNA, 23 nt, Artificial Sequence
  Synthetic construct
  misc_feature (1)..(1): 5'-3 attached terminal deoxyabasic moiety
  misc_feature (21)..(21): 3'-3 attached terminal deoxyabasic moiety
caagccuccaagcugugccuuuu

SEQ ID NO: 62 - RNA, 23 nt, Artificial Sequence
  Synthetic construct
  misc_feature (1)..(1): 5'-3 attached terminal deoxyabasic moiety
  misc_feature (21)..(21): 3'-3 attached terminal deoxyabasic moiety
aaggcacagcuuggaggcuuguu

SEQ ID NO: 63 - RNA, 23 nt, Artificial Sequence
  Synthetic construct
uccauggugcucacugcggcuuu

SEQ ID NO: 64 - RNA, 23 nt, Artificial Sequence
  Synthetic construct
agccgcagugagcaccauggauu

SEQ ID NO: 65 - RNA, 23 nt, Artificial Sequence
  Synthetic construct
  misc_feature (1)..(1): 5'-3 attached terminal deoxyabasic moiety
  misc_feature (21)..(21): 3'-3 attached terminal deoxyabasic moiety
uccauggugcucacugcggcuuu

SEQ ID NO: 66 - RNA, 23 nt, Artificial Sequence
  Synthetic construct
  misc_feature (1)..(1): 5'-3 attached terminal deoxyabasic moiety
  misc_feature (21)..(21): 3'-3 attached terminal deoxyabasic moiety
agccgcagugagcaccauggauu

SEQ ID NO: 67 - DNA, 21 bp, Artificial Sequence
  Synthetic construct
  misc_feature (1)..(19): ribonucleotide modified as described
cguacgcggaauacuucgatt

SEQ ID NO: 68 - DNA, 21 bp, Artificial Sequence
  Synthetic construct
  misc_feature (1)..(19): ribonucleotide modified as described
ucgaaguauuccgcguacgtt

SEQ ID NO: 69 - DNA, 21 bp, Artificial Sequence
  Synthetic construct
  misc_feature (1)..(19): ribonucleotide modified as described
agcuucauaaggcgcaugctt

SEQ ID NO: 70 - DNA, 21 bp, Artificial Sequence
  Synthetic construct
  misc_feature (1)..(19): ribonucleotide modified as described
gcaugcgccuuaugaagcutt

SEQ ID NO: 71 - DNA, 21 bp, Artificial Sequence
  Synthetic construct
  misc_feature (1)..(18): Phosphorothioate 3'-Internucleotide Linkage
  misc_feature (1)..(19): ribonucleotide modified as described
cguacgcggaauacuucgatt

SEQ ID NO: 72 - DNA, 21 bp, Artificial Sequence
  Synthetic construct
  misc_feature (1)..(1): Phosphorothioate 3'-Internucleotide Linkage
  misc_feature (3)..(3): Phosphorothioate 3'-Internucleotide Linkage
  misc_feature (5)..(5): Phosphorothioate 3'-Internucleotide Linkage
  misc_feature (7)..(7): Phosphorothioate 3'-Internucleotide Linkage
  misc_feature (12)..(12): Phosphorothioate 3'-Internucleotide Linkage
  misc_feature (14)..(17): Phosphorothioate 3'-Internucleotide Linkage
  misc_feature (1)..(19): ribonucleotide modified as described
cguacgcggaauacuucgatt

SEQ ID NO: 73 - DNA, 21 bp, Artificial Sequence
  Synthetic construct
  misc_feature (1)..(14): Phosphorothioate 3'-Internucleotide Linkage
  misc_feature (1)..(19): ribonucleotide modified as described
cguacgcggaauacuucgatt

SEQ ID NO: 74 - DNA, 21 bp, Artificial Sequence
  Synthetic construct
  misc_feature (1)..(10): Phosphorothioate 3'-Internucleotide Linkage
  misc_feature (1)..(19): ribonucleotide modified as described
cguacgcggaauacuucgatt

SEQ ID NO: 75 - DNA, 21 bp, Artificial Sequence
  Synthetic construct
  misc_feature (1)..(5): Phosphorothioate 3'-Internucleotide Linkage
  misc_feature (1)..(19): ribonucleotide modified as described
cguacgcggaauacuucgatt

SEQ ID NO: 76 - DNA, 21 bp, Artificial Sequence
  Synthetic construct
  misc_feature (1)..(18): Phosphorothioate 3'-Internucleotide Linkage
  misc_feature (1)..(19): ribonucleotide modified as described
ucgaaguauuccgcguacgtt

SEQ ID NO: 77 - DNA, 21 bp, Artificial Sequence
  Synthetic construct
  misc_feature (1)..(2): Phosphorothioate 3'-Internucleotide Linkage
  misc_feature (7)..(7): Phosphorothioate 3'-Internucleotide Linkage
  misc_feature (9)..(12): Phosphorothioate 3'-Internucleotide Linkage
  misc_feature (14)..(14): Phosphorothioate 3'-Internucleotide Linkage
  misc_feature (16)..(16): Phosphorothioate 3'-Internucleotide Linkage
  misc_feature (18)..(18): Phosphorothioate 3'-Internucleotide Linkage
  misc_feature (1)..(19): ribonucleotide modified as described
ucgaaguauuccgcguacgtt

SEQ ID NO: 78 - DNA, 21 bp, Artificial Sequence
  Synthetic construct
  misc_feature (1)..(5): Phosphorothioate 3'-Internucleotide Linkage
  misc_feature (7)..(14): Phosphorothioate 3'-Internucleotide Linkage
  misc_feature (1)..(19): ribonucleotide modified as described
ucgaaguauuccgcguacgtt

SEQ ID NO: 79 - DNA, 21 bp, Artificial Sequence
  Synthetic construct
  misc_feature (1)..(10): Phosphorothioate 3'-Internucleotide Linkage
  misc_feature (1)..(19): ribonucleotide modified as described
ucgaaguauuccgcguacgtt

SEQ ID NO: 80 - DNA, 21 bp, Artificial Sequence
  Synthetic construct
  misc_feature (1)..(5): Phosphorothioate 3'-Internucleotide Linkage
  misc_feature (1)..(19): ribonucleotide modified as described
ucgaaguauuccgcguacgtt

SEQ ID NO: 81 - DNA, 6 bp, Artificial Sequence
  Synthetic construct
cguacg

SEQ ID NO: 82 - DNA, 15 bp, Artificial Sequence
  Synthetic construct
  misc_feature (1)..(13): ribonucleotide modified as described
cggaauacuucgatt

SEQ ID NO: 83 - DNA, 8 bp, Artificial Sequence
  Synthetic construct
ucgaagua

SEQ ID NO: 84 - DNA, 13 bp, Artificial Sequence
  Synthetic construct
  misc_feature (1)..(11): ribonucleotide modified as described
uuccgcguacgtt

SEQ ID NO: 85 - DNA, 21 bp, Artificial Sequence
  Synthetic construct
  misc_feature (1)..(1): Phosphorothioate 3'-Internucleotide Linkage
  misc_feature (3)..(3): Phosphorothioate 3'-Internucleotide Linkage
  misc_feature (5)..(5): Phosphorothioate 3'-Internucleotide Linkage
  misc_feature (7)..(7): Phosphorothioate 3'-Internucleotide Linkage
  misc_feature (12)..(12): Phosphorothioate 3'-Internucleotide Linkage
  misc_feature (14)..(17): Phosphorothioate 3'-Internucleotide Linkage
  misc_feature (1)..(19): ribonucleotide modified as described
  misc_feature (20)..(20): Phosphorothioate 3'-Internucleotide Linkage
cguacgcggaauacuucgatt

SEQ ID NO: 86 - DNA, 21 bp, Artificial Sequence
  Synthetic construct
  misc_feature (1)..(19): ribonucleotide modified as described
  misc_feature (20)..(20): Phosphorothioate 3'-Internucleotide Linkage
ucgaaguauuccgcguacgtt

SEQ ID NO: 87 - DNA, 21 bp, Artificial Sequence
  Synthetic construct
  misc_feature (1)..(2): Phosphorothioate 3'-Internucleotide Linkage
  misc_feature (7)..(7): Phosphorothioate 3'-Internucleotide Linkage
  misc_feature (9)..(12): Phosphorothioate 3'-Internucleotide Linkage
  misc_feature (14)..(14): Phosphorothioate 3'-Internucleotide Linkage
  misc_feature (16)..(16): Phosphorothioate 3'-Internucleotide Linkage
  misc_feature (18)..(18): Phosphorothioate 3'-Internucleotide Linkage
  misc_feature (1)..(19): ribonucleotide modified as described
  misc_feature (20)..(20): Phosphorothioate 3'-Internucleotide Linkage
ucgaaguauuccgcguacgtt

SEQ ID NO: 88 - DNA, 21 bp, Artificial Sequence
  Synthetic construct
  misc_feature (1)..(19): ribonucleotide modified as described
uggggucgucaaagacguutt

SEQ ID NO: 89 - DNA, 21 bp, Artificial Sequence
  Synthetic construct
  misc_feature (1)..(19): ribonucleotide modified as described
aacgucuuugacgaccccatt

SEQ ID NO: 90 - DNA, 21 bp, Artificial Sequence
  Synthetic construct
  misc_feature (1)..(19): ribonucleotide modified as described
uugcagaaacugcuggggutt

SEQ ID NO: 91 - DNA, 21 bp, Artificial Sequence
  Synthetic construct
  misc_feature (1)..(19): ribonucleotide modified as described
accccagcaguuucugcaatt

SEQ ID NO: 92 - DNA, 21 bp, Artificial Sequence
  Synthetic construct
  misc_feature (1)..(19): ribonucleotide modified as described
ggugcuuggaucuggcgcutt

SEQ ID NO: 93 - DNA, 21 bp, Artificial Sequence
  Synthetic construct
  misc_feature (1)..(19): ribonucleotide modified as described
agcgccagauccaagcacctt

SEQ ID NO: 94 - DNA, 21 bp, Artificial Sequence
  Synthetic construct
  misc_feature (1)..(19): ribonucleotide modified as described
ucgcggucuagguucguggtt

SEQ ID NO: 95 - DNA, 21 bp, Artificial Sequence
  Synthetic construct
  misc_feature (1)..(19): ribonucleotide modified as described
ccacgaaccuagaccgcgatt

SEQ ID NO: 96 - DNA, 21 bp, Artificial Sequence
  Synthetic construct
  misc_feature (1)..(19): ribonucleotide modified as described
gaucuuugggagccuggcatt

SEQ ID NO: 97 - DNA, 21 bp, Artificial Sequence
  Synthetic construct
  misc_feature (1)..(19): ribonucleotide modified as described
ugccaggcucccaaagauctt

SEQ ID NO: 98 - DNA, 21 bp, Artificial Sequence
  Synthetic construct
  misc_feature (1)..(19): ribonucleotide modified as described
acgguccgaggguuucuagtt

SEQ ID NO: 99 - DNA, 21 bp, Artificial Sequence
  Synthetic construct
  misc_feature (1)..(19): ribonucleotide modified as described
cuagaaacccucggaccgutt

SEQ ID NO: 100 - DNA, 21 bp, Artificial Sequence
  Synthetic construct
  misc_feature (3)..(6): Phosphorothioate 3'-Internucleotide Linkage
  misc_feature (8)..(8): Phosphorothioate 3'-Internucleotide Linkage
  misc_feature (13)..(13): Phosphorothioate 3'-Internucleotide Linkage
  misc_feature (15)..(15): Phosphorothioate 3'-Internucleotide Linkage
  misc_feature (17)..(17): Phosphorothioate 3'-Internucleotide Linkage
  misc_feature (1)..(19): ribonucleotide modified as described
agcuucauaaggcgcaugctt

SEQ ID NO: 101 - DNA, 21 bp, Artificial Sequence
  Synthetic construct
  misc_feature (1)..(5): Phosphorothioate 3'-Internucleotide Linkage
  misc_feature (1)..(19): ribonucleotide modified as described
agcuucauaaggcgcaugctt

SEQ ID NO: 102 - DNA, 21 bp, Artificial Sequence
  Synthetic construct
  misc_feature (2)..(2): Phosphorothioate 3'-Internucleotide Linkage
  misc_feature (4)..(4): Phosphorothioate 3'-Internucleotide Linkage
  misc_feature (6)..(6): Phosphorothioate 3'-Internucleotide Linkage
  misc_feature (8)..(11): Phosphorothioate 3'-Internucleotide Linkage
  misc_feature (13)..(13): Phosphorothioate 3'-Internucleotide Linkage
  misc_feature (18)..(18): Phosphorothioate 3'-Internucleotide Linkage
  misc_feature (1)..(19): ribonucleotide modified as described
gcaugcgccuuaugaagcutt

SEQ ID NO: 103 - DNA, 21 bp, Artificial Sequence
  Synthetic construct
  misc_feature (1)..(5): Phosphorothioate 3'-Internucleotide Linkage
  misc_feature (1)..(19): ribonucleotide modified as described
gcaugcgccuuaugaagcutt

SEQ ID NO: 104 - DNA, 21 bp, Artificial Sequence
  Synthetic construct
  misc_feature (1)..(18): Phosphorothioate 3'-Internucleotide Linkage
  misc_feature (1)..(19): ribonucleotide modified as described
gcaugcgccuuaugaagcutt

SEQ ID NO: 105 - DNA, 21 bp, Artificial Sequence
  Synthetic construct
  misc_feature (1)..(14): Phosphorothioate 3'-Internucleotide Linkage
  misc_feature (1)..(19): ribonucleotide modified as described
gcaugcgccuuaugaagcutt

SEQ ID NO: 106 - DNA, 21 bp, Artificial Sequence
  Synthetic construct
  misc_feature (1)..(10): Phosphorothioate 3'-Internucleotide Linkage
  misc_feature (1)..(19): ribonucleotide modified as described
gcaugcgccuuaugaagcutt

SEQ ID NO: 107 - DNA, 21 bp, Artificial Sequence
  Synthetic construct
  misc_feature (1)..(19): ribonucleotide modified as described
cagcacagacccagcugugtt

SEQ ID NO: 108 - DNA, 21 bp, Artificial Sequence
  Synthetic construct
  misc_feature (1)..(19): ribonucleotide modified as described
cacagcugggucugugcugtt

SEQ ID NO: 109 - DNA, 21 bp, Artificial Sequence
  Synthetic construct
  misc_feature (1)..(19): ribonucleotide modified as described
gugucgacccagacacgactt

SEQ ID NO: 110 - DNA, 21 bp, Artificial Sequence
  Synthetic construct
  misc_feature (1)..(19): ribonucleotide modified as described
gucgugucugggucgacactt

SEQ ID NO: 111 - DNA, 21 bp, Artificial Sequence
  Synthetic construct
  misc_feature (1)..(19): ribonucleotide modified as described
gcaggcuggagguaaggcctt

SEQ ID NO: 112 - DNA, 21 bp, Artificial Sequence
  Synthetic construct
  misc_feature (1)..(19): ribonucleotide modified as described
ggccuuaccuccagccugctt

SEQ ID NO: 113 - DNA, 21 bp, Artificial Sequence
  Synthetic construct
  misc_feature (1)..(19): ribonucleotide modified as described
ccggaauggaggucggacgtt

SEQ ID NO: 114 - DNA, 21 bp, Artificial Sequence
  Synthetic construct
  misc_feature (1)..(19): ribonucleotide modified as described
cguccgaccuccauuccggtt

SEQ ID NO: 115 - DNA, 21 bp, Artificial Sequence
  Synthetic construct
  misc_feature (1)..(19): ribonucleotide modified as described
gacuucuccuccauugcggtt

SEQ ID NO: 116 - DNA, 21 bp, Artificial Sequence
  Synthetic construct
  misc_feature (1)..(19): ribonucleotide modified as described
ccgcaauggaggagaaguctt

SEQ ID NO: 117 - DNA, 21 bp, Artificial Sequence
  Synthetic construct
  misc_feature (1)..(19): ribonucleotide modified as described
ggcguuaccuccucuucagtt

SEQ ID NO: 118 - DNA, 21 bp, Artificial Sequence
  Synthetic construct
  misc_feature (1)..(19): ribonucleotide modified as described
cugaagaggagguaacgcctt

SEQ ID NO: 119 - DNA, 21 bp, Artificial Sequence
  Synthetic construct
  misc_feature (1)..(19): ribonucleotide modified as described
cacugccgagcucaagauctt

SEQ ID NO: 120 - DNA, 21 bp, Artificial Sequence
  Synthetic construct
  misc_feature (1)..(19): ribonucleotide modified as described
gaucuugagcucggcagugtt

SEQ ID NO: 121 - DNA, 21 bp, Artificial Sequence
  Synthetic construct
  misc_feature (1)..(19): ribonucleotide modified as described
cuagaacucgagccgucactt

SEQ ID NO: 122 - DNA, 21 bp, Artificial Sequence
  Synthetic construct
  misc_feature (1)..(19): ribonucleotide modified as described
gugacggcucgaguucuagtt

SEQ ID NO: 123 - DNA, 21 bp, Artificial Sequence
  Synthetic construct
  misc_feature (1)..(19): ribonucleotide modified as described
ggaguuccucaugugcaagtt

SEQ ID NO: 124 - DNA, 21 bp, Artificial Sequence
  Synthetic construct
  misc_feature (1)..(19): ribonucleotide modified as described
cuugcacaugaggaacucctt

SEQ ID NO: 125 - DNA, 21 bp, Artificial Sequence
  Synthetic construct
  misc_feature (1)..(19): ribonucleotide modified as described
gaacguguacuccuugaggtt

SEQ ID NO: 126 - DNA, 21 bp, Artificial Sequence
  Synthetic construct
  misc_feature (1)..(19): ribonucleotide modified as described
ccucaaggaguacacguuctt

SEQ ID NO: 127 - DNA, 21 bp, Artificial Sequence
  Synthetic construct
  misc_feature (1)..(19): ribonucleotide modified as described
ucaagagcuccgagaugcctt

SEQ ID NO: 128 - DNA, 21 bp, Artificial Sequence
  Synthetic construct
  misc_feature (1)..(19): ribonucleotide modified as described
ggcaucucggagcucuugatt

SEQ ID NO: 129 - DNA, 21 bp, Artificial Sequence
  Synthetic construct
  misc_feature (1)..(19): ribonucleotide modified as described
ccguagagccucgagaacutt

SEQ ID NO: 130 - DNA, 21 bp, Artificial Sequence
  Synthetic construct
  misc_feature (1)..(19): ribonucleotide modified as described
aguucucgaggcucuacggtt

SEQ ID NO: 131 - DNA, 21 bp, Artificial Sequence
  Synthetic construct
  misc_feature (1)..(19): ribonucleotide modified as described
gcagauggcugaggacaagtt

SEQ ID NO: 132 - DNA, 21 bp, Artificial Sequence
  Synthetic construct
  misc_feature (1)..(19): ribonucleotide modified as described
cuuguccucagccaucugctt

SEQ ID NO: 133 - DNA, 21 bp, Artificial Sequence
  Synthetic construct
  misc_feature (1)..(19): ribonucleotide modified as described
gaacaggagucgguagacgtt

SEQ ID NO: 134 - DNA, 21 bp, Artificial Sequence
  Synthetic construct
  misc_feature (1)..(19): ribonucleotide modified as described
cgucuaccgacuccuguuctt

SEQ ID NO: 135 - DNA, 52 bp, Artificial Sequence
  Synthetic construct
aacguacgcggaauacuucgauuaaaaguaaucgaaguauuccgcguacguu

SEQ ID NO: 136 - DNA, 50 bp, Artificial Sequence
  Synthetic construct
cguacgcggaauacuucgauuaaaaguaaucgaaguauuccgcguacguu

SEQ ID NO: 137 - DNA, 50 bp, Artificial Sequence
  Synthetic construct
aacguacgcggaauacuucgauuaaagaaucgaaguauuccgcguacguu

SEQ ID NO: 138 - DNA, 48 bp, Artificial Sequence
  Synthetic construct
cguacgcggaauacuucgauuaaagaaucgaaguauuccgcguacguu

SEQ ID NO: 139 - DNA, 47 bp, Artificial Sequence
  Synthetic construct
cguacgcggaauacuucgauuguuaaucgaaguauuccgcguacguu

SEQ ID NO: 140 - DNA, 49 bp, Artificial Sequence
  Synthetic construct
aacguacgcggaauacuucgauuguuaaucgaaguauuccgcguacguu

SEQ ID NO: 141 - DNA, 51 bp, Artificial Sequence
  Synthetic construct
aacguacgcggaauacuucgauuaguuuaaucgaaguauuccgcguacguu

SEQ ID NO: 142 - DNA, 49 bp, Artificial Sequence
  Synthetic construct
cguacgcggaauacuucgauuaguuuaaucgaaguauuccgcguacguu

SEQ ID NO: 143 - DNA, 21 bp, Artificial Sequence
  Synthetic construct
  misc_feature (1)..(19): ribonucleotide modified as described
ccccgggaggucucguagatt

SEQ ID NO: 144 - DNA, 21 bp, Artificial Sequence
  Synthetic construct
  misc_feature (1)..(19): ribonucleotide modified as described
cggaaccggugaguacacctt

SEQ ID NO: 145 - DNA, 21 bp, Artificial Sequence
  Synthetic construct
  misc_feature (1)..(19): ribonucleotide modified as described
gccccgggaggucucguagtt

SEQ ID NO: 146 - DNA, 21 bp, Artificial Sequence
  Synthetic construct
  misc_feature (1)..(19): ribonucleotide modified as described
ggaaccggugaguacaccgtt

SEQ ID NO: 147 - DNA, 21 bp, Artificial Sequence
  Synthetic construct
  misc_feature (1)..(19): ribonucleotide modified as described
gugguacugccugauagggtt

SEQ ID NO: 148 - DNA, 21 bp, Artificial Sequence
  Synthetic construct
  misc_feature (1)..(19): ribonucleotide modified as described
ugugguacugccugauaggtt

SEQ ID NO: 149 - DNA, 21 bp, Artificial Sequence
  Synthetic construct
  misc_feature (1)..(19): ribonucleotide modified as described
uugugguacugccugauagtt

SEQ ID NO: 150 - DNA, 21 bp, Artificial Sequence
  Synthetic construct
  misc_feature (1)..(19): ribonucleotide modified as described
ucuacgagaccucccggggtt

SEQ ID NO: 151 - DNA, 21 bp, Artificial Sequence
  Synthetic construct
  misc_feature (1)..(19): ribonucleotide modified as described
gguguacucaccgguuccgtt

SEQ ID NO: 152 - DNA, 21 bp, Artificial Sequence
  Synthetic construct
  misc_feature (1)..(19): ribonucleotide modified as described
cuacgagaccucccggggctt

SEQ ID NO: 153 - DNA, 21 bp, Artificial Sequence
  Synthetic construct
  misc_feature (1)..(19): ribonucleotide modified as described
cgguguacucaccgguucctt

SEQ ID NO: 154 - DNA, 21 bp, Artificial Sequence
  Synthetic construct
  misc_feature (1)..(19): ribonucleotide modified as described
cccuaucaggcaguaccactt

SEQ ID NO: 155 - DNA, 21 bp, Artificial Sequence
  Synthetic construct
  misc_feature (1)..(19): ribonucleotide modified as described
ccuaucaggcaguaccacatt

SEQ ID NO: 156 - DNA, 21 bp, Artificial Sequence
  Synthetic construct
  misc_feature (1)..(19): ribonucleotide modified as described
cuaucaggcaguaccacaatt

SEQ ID NO: 157 - DNA, 21 bp, Artificial Sequence
  Synthetic construct
  misc_feature (3)..(21): ribonucleotide modified as described
ttagaugcucuggagggcccc

SEQ ID NO: 158 - DNA, 21 bp, Artificial Sequence
  Synthetic construct
  misc_feature (3)..(21): ribonucleotide modified as described
ttccacaugaguggccaaggc

SEQ ID NO: 159 - DNA, 21 bp, Artificial Sequence
  Synthetic construct
  misc_feature (3)..(21): ribonucleotide modified as described
ttgaugcucuggagggccccg

SEQ ID NO: 160 - DNA, 21 bp, Artificial Sequence
  Synthetic construct
  misc_feature (3)..(21): ribonucleotide modified as described
ttgccacaugaguggccaagg

SEQ ID NO: 161 - DNA, 21 bp, Artificial Sequence
  Synthetic construct
  misc_feature (3)..(21): ribonucleotide modified as described
ttgggauaguccgucauggug

SEQ ID NO: 162 - DNA, 21 bp, Artificial Sequence
  Synthetic construct
  misc_feature (3)..(21): ribonucleotide modified as described
ttggauaguccgucauggugu

SEQ ID NO: 163 - DNA, 21 bp, Artificial Sequence
  Synthetic construct
  misc_feature (3)..(21): ribonucleotide modified as described
ttgauaguccgucaugguguu

SEQ ID NO: 164 - DNA, 21 bp, Artificial Sequence
  Synthetic construct
  misc_feature (3)..(21): ribonucleotide modified as described
ttggggcccuccagagcaucu

SEQ ID NO: 165 - DNA, 21 bp, Artificial Sequence
  Synthetic construct
  misc_feature (3)..(21): ribonucleotide modified as described
ttgccuuggccacucaugugg

SEQ ID NO: 166 - DNA, 21 bp, Artificial Sequence
  Synthetic construct
  misc_feature (3)..(21): ribonucleotide modified as described
ttcggggcccuccagagcauc

SEQ ID NO: 167 - DNA, 21 bp, Artificial Sequence
  Synthetic construct
  misc_feature (3)..(21): ribonucleotide modified as described
ttccuuggccacucauguggc

SEQ ID NO: 168 - DNA, 21 bp, Artificial Sequence
  Synthetic construct
  misc_feature (3)..(21): ribonucleotide modified as described
ttcaccaugacggacuauccc

SEQ ID NO: 169 - DNA, 21 bp, Artificial Sequence
  Synthetic construct
  misc_feature (3)..(21): ribonucleotide modified as described
ttacaccaugacggacuaucc

SEQ ID NO: 170 - DNA, 21 bp, Artificial Sequence
  Synthetic construct
  misc_feature (3)..(21): ribonucleotide modified as described
ttaacaccaugacggacuauc

SEQ ID NO: 171 - DNA, 21 bp, Artificial Sequence
  Synthetic construct
  misc_feature (1)..(5): Phosphorothioate 3'-Internucleotide Linkage
  misc_feature (1)..(19): ribonucleotide modified as described
  misc_feature (20)..(20): Phosphorothioate 3'-Internucleotide Linkage
agcuucauaaggcgcaugctt

SEQ ID NO: 172 - DNA, 21 bp, Artificial Sequence
  Synthetic construct
  misc_feature (1)..(5): Phosphorothioate 3'-Internucleotide Linkage
  misc_feature (1)..(19): ribonucleotide modified as described
  misc_feature (20)..(20): Phosphorothioate 3'-Internucleotide Linkage
gcaugcgccuuaugaagcutt

SEQ ID NO: 173 - DNA, 21 bp, Artificial Sequence
  Synthetic construct
  misc_feature (1)..(5): Phosphorothioate 3'-Internucleotide Linkage
  misc_feature (1)..(19): ribonucleotide modified as described
  misc_feature (20)..(20): Phosphorothioate 3'-Internucleotide Linkage
cguacgcggaauacuucgatt

SEQ ID NO: 174 - DNA, 21 bp, Artificial Sequence
  Synthetic construct
  misc_feature (1)..(5): Phosphorothioate 3'-Internucleotide Linkage
  misc_feature (1)..(19): ribonucleotide modified as described
  misc_feature (20)..(20): Phosphorothioate 3'-Internucleotide Linkage
ucgaaguauuccgcguacgtt

SEQ ID NO: 175 - DNA, 42 bp, Artificial Sequence
  Synthetic construct
  misc_feature (1)..(19): ribonucleotide modified as described
  misc_feature (21)..(21): inverted deoxyabasic
  misc_feature (23)..(40): ribonucleotide modified as described
cguacgcggaauacuucgattucgaaguauuccgcguacgtt

SEQ ID NO: 176 - DNA, 21 bp, Artificial Sequence
  Synthetic construct
  misc_feature (1)..(19): ribonucleotide modified as described
gucuagacucgugguggactt

SEQ ID NO: 177 - DNA, 21 bp, Artificial Sequence
  Synthetic construct
  misc_feature (1)..(19): ribonucleotide modified as described
ccugcugcuaugccucauctt

SEQ ID NO: 178 - DNA, 21 bp, Artificial Sequence
  Synthetic construct
  misc_feature (1)..(19): ribonucleotide modified as described
caagccuccaagcugugcctt

SEQ ID NO: 179 - DNA, 21 bp, Artificial Sequence
  Synthetic construct
  misc_feature (1)..(19): ribonucleotide modified as described
agcugugccuuggguggcutt

SEQ ID NO: 180 - DNA, 21 bp, Artificial Sequence
  Synthetic construct
  misc_feature (1)..(19): ribonucleotide modified as described
guccaccacgagucuagactt

SEQ ID NO: 181 - DNA, 21 bp, Artificial Sequence
  Synthetic construct
  misc_feature (1)..(19): ribonucleotide modified as described
gaugaggcauagcagcaggtt

SEQ ID NO: 182 - DNA, 21 bp, Artificial Sequence
  Synthetic construct
  misc_feature (1)..(19): ribonucleotide modified as described
ggcacagcuuggaggcuugtt

SEQ ID NO: 183 - DNA, 21 bp, Artificial Sequence
  Synthetic construct
  misc_feature (1)..(19): ribonucleotide modified as described
agccacccaaggcacagcutt

SEQ ID NO: 184 - DNA, 21 bp, Artificial Sequence
  Synthetic construct
  misc_feature (1)..(19): ribonucleotide modified as described
cagguggugcucagaucugtt

SEQ ID NO: 185 - DNA, 21 bp, Artificial Sequence
  Synthetic construct
  misc_feature (1)..(19): ribonucleotide modified as described
cuacuccguaucgucgucctt

SEQ ID NO: 186 - DNA, 21 bp, Artificial Sequence
  Synthetic construct
  misc_feature (1)..(19): ribonucleotide modified as described
ccgugucgaaccuccgaactt

SEQ ID NO: 187 - DNA, 21 bp, Artificial Sequence
  Synthetic construct
  misc_feature (1)..(19): ribonucleotide modified as described
ucgguggguuccgugucgatt

SEQ ID NO: 188 - DNA, 21 bp, Artificial Sequence
  Synthetic construct
  misc_feature (1)..(19): ribonucleotide modified as described
cagaucugagcaccaccugtt

SEQ ID NO: 189 - DNA, 21 bp, Artificial Sequence
  Synthetic construct
  misc_feature (1)..(19): ribonucleotide modified as described
ggacgacgauacggaguagtt

SEQ ID NO: 190 - DNA, 21 bp, Artificial Sequence
  Synthetic construct
  misc_feature (1)..(19): ribonucleotide modified as described
guucggagguucgacacggtt

SEQ ID NO: 191 - DNA, 21 bp, Artificial Sequence
  Synthetic construct
  misc_feature (1)..(19): ribonucleotide modified as described
ucgacacggaacccaccgatt

SEQ ID NO: 192 - DNA, 21 bp, Artificial Sequence
  Synthetic construct
cggaaccggugaguacaccgg

SEQ ID NO: 193 - DNA, 21 bp, Artificial Sequence
  Synthetic construct
ggaaccggugaguacaccgga

SEQ ID NO: 194 - DNA, 21 bp, Artificial Sequence
  Synthetic construct
uugugguacugccugauaggg

SEQ ID NO: 195 - DNA, 21 bp, Artificial Sequence
  Synthetic construct
ugugguacugccugauagggu

SEQ ID NO: 196 - DNA, 21 bp, Artificial Sequence
  Synthetic construct
gugguacugccugauagggug

SEQ ID NO: 197 - DNA, 21 bp, Artificial Sequence
  Synthetic construct
gccccgggaggucucguagac

SEQ ID NO: 198 - DNA, 21 bp, Artificial Sequence
  Synthetic construct
ccccgggaggucucguagacc

SEQ ID NO: 199 - DNA, 21 bp, Artificial Sequence
  Synthetic construct
gguguacucaccgguuccgca

SEQ ID NO: 200 - DNA, 21 bp, Artificial Sequence
  Synthetic construct
cgguguacucaccgguuccgc

SEQ ID NO: 201 - DNA, 21 bp, Artificial Sequence
  Synthetic construct
cuaucaggcaguaccacaagg

SEQ ID NO: 202 - DNA, 21 bp, Artificial Sequence
  Synthetic construct
ccuaucaggcaguaccacaag

SEQ ID NO: 203 - DNA, 21 bp, Artificial Sequence
  Synthetic construct
cccuaucaggcaguaccacaa

SEQ ID NO: 204 - DNA, 21 bp, Artificial Sequence
  Synthetic construct
cuacgagaccucccggggcac

SEQ ID NO: 205 - DNA, 21 bp, Artificial Sequence
  Synthetic construct
ucuacgagaccucccggggca

SEQ ID NO: 206 - DNA, 21 bp, Artificial Sequence
  Synthetic construct
ggccacaugaguggccaaggc

SEQ ID NO: 207 - DNA, 21 bp, Artificial Sequence
  Synthetic construct
aggccacaugaguggccaagg

SEQ ID NO: 208 - DNA, 21 bp, Artificial Sequence
  Synthetic construct
gggauaguccgucaugguguu

SEQ ID NO: 209 - DNA, 21 bp, Artificial Sequence
  Synthetic construct
ugggauaguccgucauggugu

SEQ ID NO: 210 - DNA, 21 bp, Artificial Sequence
  Synthetic construct
gugggauaguccgucauggug

SEQ ID NO: 211 - DNA, 21 bp, Artificial Sequence
  Synthetic construct
cagaugcucuggagggccccg

SEQ ID NO: 212 - DNA, 21 bp, Artificial Sequence
  Synthetic construct
ccagaugcucuggagggcccc

SEQ ID NO: 213 - DNA, 21 bp, Artificial Sequence
  Synthetic construct
acgccuuggccacucaugugg

SEQ ID NO: 214 - DNA, 21 bp, Artificial Sequence
  Synthetic construct
cgccuuggccacucauguggc

SEQ ID NO: 215 - DNA, 21 bp, Artificial Sequence
  Synthetic construct
ggaacaccaugacggacuauc

SEQ ID NO: 216 - DNA, 21 bp, Artificial Sequence
  Synthetic construct
gaacaccaugacggacuaucc

SEQ ID NO: 217 - DNA, 21 bp, Artificial Sequence
  Synthetic construct
aacaccaugacggacuauccc

SEQ ID NO: 218 - DNA, 21 bp, Artificial Sequence
  Synthetic construct
cacggggcccuccagagcauc

SEQ ID NO: 219 - DNA, 21 bp, Artificial Sequence
  Synthetic construct
acggggcccuccagagcaucu

SEQ ID NO: 220 - DNA, 21 bp, Artificial Sequence
  Synthetic construct
cagaugcacauaucgagguga

SEQ ID NO: 221 - DNA, 21 bp, Artificial Sequence
  Synthetic construct
cagaugcacauaucgaggugg

SEQ ID NO: 222 - DNA, 21 bp, Artificial Sequence
  Synthetic construct
  misc_feature (1)..(19): ribonucleotide modified as described
cagaugcacauaucgaggutt

SEQ ID NO: 223 - DNA, 21 bp, Artificial Sequence
  Synthetic construct
accucgauaugugcaucugua

SEQ ID NO: 224 - DNA, 21 bp, Artificial Sequence
  Synthetic construct
  misc_feature (1)..(19): ribonucleotide modified as described
accucgauaugugcaucugtt

SEQ ID NO: 225 - DNA, 21 bp, Artificial Sequence
  Synthetic construct
uacuucgaaauguccguucgg

SEQ ID NO: 226 - DNA, 21 bp, Artificial Sequence
  Synthetic construct
  misc_feature (1)..(19): ribonucleotide modified as described
uacuucgaaauguccguuctt

SEQ ID NO: 227 - DNA, 21 bp, Artificial Sequence
  Synthetic construct
gaacggacauuucgaaguauu

SEQ ID NO: 228 - DNA, 21 bp, Artificial Sequence
  Synthetic construct
gaacggacauuucgaaguacu

SEQ ID NO: 229 - DNA, 21 bp, Artificial Sequence
  Synthetic construct
  misc_feature (1)..(19): ribonucleotide modified as described
gaacggacauuucgaaguatt

SEQ ID NO: 230 - DNA, 21 bp, Artificial Sequence
  Synthetic construct
acuucgaaauguccguucggu

SEQ ID NO: 231 - DNA, 21 bp, Artificial Sequence
  Synthetic construct
  misc_feature (1)..(19): ribonucleotide modified as described
acuucgaaauguccguucgtt

SEQ ID NO: 232 - DNA, 21 bp, Artificial Sequence
  Synthetic construct
cgaacggacauuucgaaguau

SEQ ID NO: 233 - DNA, 21 bp, Artificial Sequence
  Synthetic construct
cgaacggacauuucgaaguac

SEQ ID NO: 234 - DNA, 21 bp, Artificial Sequence
  Synthetic construct
  misc_feature (1)..(19): ribonucleotide modified as described
cgaacggacauuucgaagutt

SEQ ID NO: 235 - DNA, 21 bp, Artificial Sequence
  Synthetic construct
agauucucgcaugccagagau

SEQ ID NO: 236 - DNA, 21 bp, Artificial Sequence
  Synthetic construct
  misc_feature (1)..(19): ribonucleotide modified as described
agauucucgcaugccagagtt

SEQ ID NO: 237 - DNA, 21 bp, Artificial Sequence
  Synthetic construct
cucuggcaugcgagaaucuga

SEQ ID NO: 238 - DNA, 21 bp, Artificial Sequence
  Synthetic construct
cucuggcaugcgagaaucuca

SEQ ID NO: 239 - DNA, 21 bp, Artificial Sequence
  Synthetic construct
  misc_feature (1)..(19): ribonucleotide modified as described
cucuggcaugcgagaaucutt

SEQ ID NO: 240 - DNA, 21 bp, Artificial Sequence
  Synthetic construct
gauucucgcaugccagagauc

SEQ ID NO: 241 - DNA, 21 bp, Artificial Sequence
  Synthetic construct
  misc_feature (1)..(19): ribonucleotide modified as described
gauucucgcaugccagagatt

SEQ ID NO: 242 - DNA, 21 bp, Artificial Sequence
  Synthetic construct
ucucuggcaugcgagaaucug

SEQ ID NO: 243 - DNA, 21 bp, Artificial Sequence
  Synthetic construct
ucucuggcaugcgagaaucuc

SEQ ID NO: 244 - DNA, 21 bp, Artificial Sequence
  Synthetic construct
  misc_feature (1)..(19): ribonucleotide modified as described
ucucuggcaugcgagaauctt

SEQ ID NO: 245 - DNA, 21 bp, Artificial Sequence
  Synthetic construct
uucuucgccaaaagcacucug

SEQ ID NO: 246 - DNA, 21 bp, Artificial Sequence
  Synthetic construct
  misc_feature (1)..(19): ribonucleotide modified as described
uucuucgccaaaagcacuctt

SEQ ID NO: 247 - DNA, 21 bp, Artificial Sequence
  Synthetic construct
gagugcuuuuggcgaagaaug

SEQ ID NO: 248 - DNA, 21 bp, Artificial Sequence
  Synthetic construct
gagugcuuuuggcgaagaagg

SEQ ID NO: 249 - DNA, 21 bp, Artificial Sequence
  Synthetic construct
  misc_feature (1)..(19): ribonucleotide modified as described
gagugcuuuuggcgaagaatt

SEQ ID NO: 250 - DNA, 21 bp, Artificial Sequence
  Synthetic construct
caaggauaugggcucacugag

SEQ ID NO: 251 - DNA, 21 bp, Artificial Sequence
  Synthetic construct
  misc_feature (1)..(19): ribonucleotide modified as described
caaggauaugggcucacugtt

SEQ ID NO: 252 - DNA, 21 bp, Artificial Sequence
  Synthetic construct
cagugagcccauauccuuguc

SEQ ID NO: 253 - DNA, 21 bp, Artificial Sequence
  Synthetic construct
cagugagcccauauccuugcc

SEQ ID NO: 254 - DNA, 21 bp, Artificial Sequence
  Synthetic construct
  misc_feature (1)..(19): ribonucleotide modified as described
cagugagcccauauccuugtt

SEQ ID NO: 255 - DNA, 21 bp, Artificial Sequence
  Synthetic construct
aaacgcugggcguuaaucaga

SEQ ID NO: 256 - DNA, 21 bp, Artificial Sequence
  Synthetic construct
aaacgcugggcguuaaucaaa

SEQ ID NO: 257 - DNA, 21 bp, Artificial Sequence
  Synthetic construct
  misc_feature (1)..(19): ribonucleotide modified as described
aaacgcugggcguuaaucatt

SEQ ID NO: 258 - DNA, 21 bp, Artificial Sequence
  Synthetic construct
ugauuaacgcccagcguuuuc

SEQ ID NO: 259 - DNA, 21 bp, Artificial Sequence
  Synthetic construct
  misc_feature (1)..(19): ribonucleotide modified as described
ugauuaacgcccagcguuutt

SEQ ID NO: 260 - DNA, 21 bp, Artificial Sequence
  Synthetic construct
aagacgaacacuucuucauag

SEQ ID NO: 261 - DNA, 21 bp, Artificial Sequence
  Synthetic construct
aagacgaacacuucuucaucg

SEQ ID NO: 262 - DNA, 21 bp, Artificial Sequence
  Synthetic construct
  misc_feature (1)..(19): ribonucleotide modified as described
aagacgaacacuucuucautt

SEQ ID NO: 263 - DNA, 21 bp, Artificial Sequence
  Synthetic construct
augaagaaguguucgucuucg

SEQ ID NO: 264 - DNA, 21 bp, Artificial Sequence
  Synthetic construct
  misc_feature (1)..(19): ribonucleotide modified as described
augaagaaguguucgucuutt

SEQ ID NO: 265 - DNA, 21 bp, Artificial Sequence
  Synthetic construct
aagagaucguggauuacgugg

SEQ ID NO: 266 - DNA, 21 bp, Artificial Sequence
  Synthetic construct
aagagaucguggauuacgucg

SEQ ID NO: 267 - DNA, 21 bp, Artificial Sequence
  Synthetic construct
  misc_feature (1)..(19): ribonucleotide modified as described
aagagaucguggauuacgutt

SEQ ID NO: 268 - DNA, 21 bp, Artificial Sequence
  Synthetic construct
acguaauccacgaucucuuuu

SEQ ID NO: 269 - DNA, 21 bp, Artificial Sequence
  Synthetic construct
  misc_feature (1)..(19): ribonucleotide modified as described
acguaauccacgaucucuutt

SEQ ID NO: 270 - DNA, 21 bp, Artificial Sequence
  Synthetic construct
aggccaagaagggcggaaagu

SEQ ID NO: 271 - DNA, 21 bp, Artificial Sequence
  Synthetic construct
aggccaagaagggcggaaaga

SEQ ID NO: 272 - DNA, 21 bp, Artificial Sequence
  Synthetic construct
  misc_feature (1)..(19): ribonucleotide modified as described
aggccaagaagggcggaaatt

SEQ ID NO: 273 - DNA, 21 bp, Artificial Sequence
  Synthetic construct
uuuccgcccuucuuggccuuu

SEQ ID NO: 274 - DNA, 21 bp, Artificial Sequence
  Synthetic construct
  misc_feature (1)..(19): ribonucleotide modified as described
uuuccgcccuucuuggccutt

SEQ ID NO: 275 - DNA, 21 bp, Artificial Sequence
  Synthetic construct
ggccaagaagggcggaaaguc

SEQ ID NO: 276 - DNA, 21 bp, Artificial Sequence
  Synthetic construct
ggccaagaagggcggaaagau

SEQ ID NO: 277 - DNA, 21 bp, Artificial Sequence
  Synthetic construct
  misc_feature (1)..(19): ribonucleotide modified as described
ggccaagaagggcggaaagtt

SEQ ID NO: 278 - DNA, 21 bp, Artificial Sequence
  Synthetic construct
cuuuccgcccuucuuggccuu

SEQ ID NO: 279 - DNA, 21 bp, Artificial Sequence
  Synthetic construct
  misc_feature (1)..(19): ribonucleotide modified as described
cuuuccgcccuucuuggcctt

SEQ ID NO: 280 - DNA, 21 bp, Artificial Sequence
  Synthetic construct
  misc_feature (1)..(2): Phosphorothioate 3'-Internucleotide Linkage
  misc_feature (7)..(7): Phosphorothioate 3'-Internucleotide Linkage
  misc_feature (9)..(12): Phosphorothioate 3'-Internucleotide Linkage
  misc_feature (14)..(14): Phosphorothioate 3'-Internucleotide Linkage
  misc_feature (16)..(16): Phosphorothioate 3'-Internucleotide Linkage
  misc_feature (18)..(18): Phosphorothioate 3'-Internucleotide Linkage
  misc_feature (20)..(20): u stands for 5-bromodeoxyuridine
  misc_feature (20)..(20): Phosphorothioate 3'-Internucleotide Linkage
  misc_feature (1)..(20): ribonucleotide modified as described
ucgaaguauuccgcguacgut

SEQ ID NO: 281 - DNA, 21 bp, Artificial Sequence
  Synthetic construct
  misc_feature (1)..(1): Phosphorothioate 3'-Internucleotide Linkage
  misc_feature (3)..(3): Phosphorothioate 3'-Internucleotide Linkage
  misc_feature (5)..(5): Phosphorothioate 3'-Internucleotide Linkage
  misc_feature (7)..(7): Phosphorothioate 3'-Internucleotide Linkage
  misc_feature (12)..(12): Phosphorothioate 3'-Internucleotide Linkage
  misc_feature (14)..(17): Phosphorothioate 3'-Internucleotide Linkage
  misc_feature (20)..(20): u stands for 5-bromodeoxyuridine
  misc_feature (20)..(20): Phosphorothioate 3'-Internucleotide Linkage
  misc_feature (1)..(20): ribonucleotide modified as described
cguacgcggaauacuucgaut

SEQ ID NO: 282 - DNA, 21 bp, Artificial Sequence
  Synthetic construct
  misc_feature (1)..(5): Phosphorothioate 3'-Internucleotide Linkage
  misc_feature (20)..(20): u stands for 5-bromodeoxyuridine
  misc_feature (20)..(20): Phosphorothioate 3'-Internucleotide Linkage
  misc_feature (1)..(20): ribonucleotide modified as described
cguacgcggaauacuucgaut

SEQ ID NO: 283 - DNA, 21 bp, Artificial Sequence
  Synthetic construct
  misc_feature (1)..(5): Phosphorothioate 3'-Internucleotide Linkage
  misc_feature (20)..(20): u stands for 5-bromodeoxyuridine
  misc_feature (20)..(20): Phosphorothioate 3'-Internucleotide Linkage
  misc_feature (1)..(20): ribonucleotide modified as described
ucgaaguauuccgcguacgut

SEQ ID NO: 284 - DNA, 21 bp, Artificial Sequence
  Synthetic construct
  misc_feature (1)..(1): Phosphorothioate 3'-Internucleotide Linkage
  misc_feature (3)..(3): Phosphorothioate 3'-Internucleotide Linkage
  misc_feature (5)..(5): Phosphorothioate 3'-Internucleotide Linkage
  misc_feature (7)..(7): Phosphorothioate 3'-Internucleotide Linkage
  misc_feature (12)..(12): Phosphorothioate 3'-Internucleotide Linkage
  misc_feature (14)..(17): Phosphorothioate 3'-Internucleotide Linkage
  misc_feature (1)..(19): ribonucleotide modified as described
  misc_feature (20)..(20): Phosphorothioate 3'-Internucleotide Linkage
  misc_feature (21)..(21): inverted deoxyabasic
cguacgcggaauacuucgatt

SEQ ID NO: 285 - DNA, 21 bp, Artificial Sequence
  Synthetic construct
  misc_feature (1)..(1): inverted deoxyabasic
  misc_feature (1)..(1): Phosphorothioate 3'-Internucleotide Linkage
  misc_feature (3)..(3): Phosphorothioate 3'-Internucleotide Linkage
  misc_feature (5)..(5): Phosphorothioate 3'-Internucleotide Linkage
  misc_feature (7)..(7): Phosphorothioate 3'-Internucleotide Linkage
  misc_feature (12)..(12): Phosphorothioate 3'-Internucleotide Linkage
  misc_feature (14)..(17): Phosphorothioate 3'-Internucleotide Linkage
  misc_feature (1)..(19): ribonucleotide modified as described
  misc_feature (20)..(20): Phosphorothioate 3'-Internucleotide Linkage
  misc_feature (21)..(21): inverted deoxyabasic
cguacgcggaauacuucgatt

SEQ ID NO: 286 - DNA, 21 bp, Artificial Sequence
  Synthetic construct
  misc_feature (1)..(1): inverted deoxyabasic
  misc_feature (1)..(1): Phosphorothioate 3'-Internucleotide Linkage
  misc_feature (3)..(3): Phosphorothioate 3'-Internucleotide Linkage
  misc_feature (5)..(5): Phosphorothioate 3'-Internucleotide Linkage
  misc_feature (7)..(7): Phosphorothioate 3'-Internucleotide Linkage
  misc_feature (12)..(12): Phosphorothioate 3'-Internucleotide Linkage
  misc_feature (14)..(17): Phosphorothioate 3'-Internucleotide Linkage
  misc_feature (1)..(19): ribonucleotide modified as described
  misc_feature (20)..(20): Phosphorothioate 3'-Internucleotide Linkage
cguacgcggaauacuucgatt

SEQ ID NO: 287 - DNA, 21 bp, Artificial Sequence
  Synthetic construct
  misc_feature (1)..(2): Phosphorothioate 3'-Internucleotide Linkage
  misc_feature (7)..(7): Phosphorothioate 3'-Internucleotide Linkage
  misc_feature (9)..(12): Phosphorothioate 3'-Internucleotide Linkage
  misc_feature (14)..(14): Phosphorothioate 3'-Internucleotide Linkage
  misc_feature (16)..(16): Phosphorothioate 3'-Internucleotide Linkage
  misc_feature (18)..(18): Phosphorothioate 3'-Internucleotide Linkage
  misc_feature (1)..(19): ribonucleotide modified as described
  misc_feature (20)..(20): Phosphorothioate 3'-Internucleotide Linkage
  misc_feature (21)..(21): inverted deoxyabasic
ucgaaguauuccgcguacgtt

SEQ ID NO: 288 - DNA, 21 bp, Artificial Sequence
  Synthetic construct
  misc_feature (1)..(1): inverted deoxyabasic
  misc_feature (1)..(2): Phosphorothioate 3'-Internucleotide Linkage
  misc_feature (7)..(7): Phosphorothioate 3'-Internucleotide Linkage
  misc_feature (9)..(12): Phosphorothioate 3'-Internucleotide Linkage
  misc_feature (14)..(14): Phosphorothioate 3'-Internucleotide Linkage
  misc_feature (16)..(16): Phosphorothioate 3'-Internucleotide Linkage
  misc_feature (18)..(18): Phosphorothioate 3'-Internucleotide Linkage
  misc_feature (1)..(19): ribonucleotide modified as described
  misc_feature (20)..(20): Phosphorothioate 3'-Internucleotide Linkage
  misc_feature (21)..(21): inverted deoxyabasic
ucgaaguauuccgcguacgtt

SEQ ID NO: 289 - DNA, 21 bp, Artificial Sequence
  Synthetic construct
  misc_feature (1)..(1): inverted deoxyabasic
  misc_feature (1)..(2): Phosphorothioate 3'-Internucleotide Linkage
  misc_feature (7)..(7): Phosphorothioate 3'-Internucleotide Linkage
  misc_feature (9)..(12): Phosphorothioate 3'-Internucleotide Linkage
  misc_feature (14)..(14): Phosphorothioate 3'-Internucleotide Linkage
  misc_feature (16)..(16): Phosphorothioate 3'-Internucleotide Linkage
  misc_feature (18)..(18): Phosphorothioate 3'-Internucleotide Linkage
  misc_feature (1)..(19): ribonucleotide modified as described
  misc_feature (20)..(20): Phosphorothioate 3'-Internucleotide Linkage
ucgaaguauuccgcguacgtt

SEQ ID NO: 290 - DNA, 42 bp, Artificial Sequence
  Synthetic construct
  misc_feature (1)..(19): ribonucleotide modified as described
  misc_feature (21)..(21): inverted deoxyabasic succinate linker
  misc_feature (23)..(40): ribonucleotide modified as described
ucgaaguauuccgcguacgttcguacgcggaauacuucgatt

SEQ ID NO: 291 - RNA, 6 nt, Artificial Sequence
  Synthetic construct
  misc_feature (1)..(5): Phosphorothioate 3'-Internucleotide Linkage
cguacg

SEQ ID NO: 292 - DNA, 15 bp, Artificial Sequence
  Synthetic construct
  misc_feature (1)..(13): ribonucleotide modified as described
  misc_feature (14)..(14): Phosphorothioate 3'-Internucleotide Linkage
cggaauacuucgatt

SEQ ID NO: 293 - RNA, 8 nt, Artificial Sequence
  Synthetic construct
  misc_feature (1)..(5): Phosphorothioate 3'-Internucleotide Linkage
ucgaagua

SEQ ID NO: 294 - DNA, 13 bp, Artificial Sequence
  Synthetic construct
  misc_feature (1)..(11): ribonucleotide modified as described
  misc_feature (12)..(12): Phosphorothioate 3'-Internucleotide Linkage
uuccgcguacgtt

SEQ ID NO: 295 - RNA, 8 nt, Artificial Sequence
  Synthetic construct
  misc_feature (1)..(7): Phosphorothioate 3'-Internucleotide Linkage
ucgaagua

SEQ ID NO: 296 - DNA, 13 bp, Artificial Sequence
  Synthetic construct
  misc_feature (1)..(12): Phosphorothioate 3'-Internucleotide Linkage
  misc_feature (1)..(11): ribonucleotide modified as described
uuccgcguacgtt

SEQ ID NO: 297 - DNA, 21 bp, Artificial Sequence
  Synthetic construct
  misc_feature (1)..(5): Phosphorothioate 3'-Internucleotide Linkage
  misc_feature (1)..(19): ribonucleotide modified as described
  misc_feature (20)..(20): Phosphorothioate 3'-Internucleotide Linkage
cugaguuuaaaaggcaccctt

SEQ ID NO: 298 - DNA, 21 bp, Artificial Sequence
  Synthetic construct
  misc_feature (1)..(5): Phosphorothioate 3'-Internucleotide Linkage
  misc_feature (1)..(19): ribonucleotide modified as described
  misc_feature (20)..(20): Phosphorothioate 3'-Internucleotide Linkage
caaccacaaaauacaacaatt

SEQ ID NO: 299 - DNA, 21 bp, Artificial Sequence
  Synthetic construct
  misc_feature (1)..(5): Phosphorothioate 3'-Internucleotide Linkage
  misc_feature (1)..(19): ribonucleotide modified as described
  misc_feature (20)..(20): Phosphorothioate 3'-Internucleotide Linkage
ccuggaaagaaucaaaacctt

SEQ ID NO: 300 - DNA, 21 bp, Artificial Sequence
  Synthetic construct
  misc_feature (1)..(5): Phosphorothioate 3'-Internucleotide Linkage
  misc_feature (1)..(19): ribonucleotide modified as described
  misc_feature (20)..(20): Phosphorothioate 3'-Internucleotide Linkage
gcaaggagggccucugaugtt

SEQ ID NO: 301 - DNA, 21 bp, Artificial Sequence
  Synthetic construct
  misc_feature (1)..(5): Phosphorothioate 3'-Internucleotide Linkage
  misc_feature (1)..(19): ribonucleotide modified as described
  misc_feature (20)..(20): Phosphorothioate 3'-Internucleotide Linkage
gggugccuuuuaaacucagtt

SEQ ID NO: 302 - DNA, 21 bp, Artificial Sequence
  Synthetic construct
  misc_feature (1)..(5): Phosphorothioate 3'-Internucleotide Linkage
  misc_feature (1)..(19): ribonucleotide modified as described
  misc_feature (20)..(20): Phosphorothioate 3'-Internucleotide Linkage
uuguuguauuuugugguugtt

SEQ ID NO: 303 - DNA, 21 bp, Artificial Sequence
  Synthetic construct
  misc_feature (1)..(5): Phosphorothioate 3'-Internucleotide Linkage
  misc_feature (1)..(19): ribonucleotide modified as described
  misc_feature (20)..(20): Phosphorothioate 3'-Internucleotide Linkage
gguuuugauucuuuccaggtt

SEQ ID NO: 304 - DNA, 21 bp, Artificial Sequence
  Synthetic construct
  misc_feature (1)..(5): Phosphorothioate 3'-Internucleotide Linkage
  misc_feature (1)..(19): ribonucleotide modified as described
  misc_feature (20)..(20): Phosphorothioate 3'-Internucleotide Linkage
caucagaggcccuccuugctt

SEQ ID NO: 305 - DNA, 21 bp, Artificial Sequence
  Synthetic construct
  misc_feature (1)..(20): Phosphorothioate 3'-Internucleotide Linkage
  misc_feature (1)..(19): ribonucleotide modified as described
gggugccuuuuaaacucagtt

SEQ ID NO: 306 - DNA, 21 bp, Artificial Sequence
  Synthetic construct
  misc_feature (1)..(20): Phosphorothioate 3'-Internucleotide Linkage
  misc_feature (1)..(19): ribonucleotide modified as described
uuguuguauuuugugguugtt

SEQ ID NO: 307 - DNA, 21 bp, Artificial Sequence
  Synthetic construct
  misc_feature (1)..(20): Phosphorothioate 3'-Internucleotide Linkage
  misc_feature (1)..(19): ribonucleotide modified as described
gguuuugauucuuuccaggtt

SEQ ID NO: 308 - DNA, 21 bp, Artificial Sequence
  Synthetic construct
  misc_feature (1)..(20): Phosphorothioate 3'-Internucleotide Linkage
  misc_feature (1)..(19): ribonucleotide modified as described
caucagaggcccuccuugctt

SEQ ID NO: 309 - RNA, 43 nt, Artificial Sequence
  Synthetic construct
  misc_feature (1)..(43): 2'-O-methyl
ggcauuggccaacguacgcggaauacuucgauucgguuacgaa

SEQ ID NO: 310 - RNA, 21 nt, Artificial Sequence
  Synthetic construct
  misc_feature (1)..(21): 2'-O-methyl
cguacgcggaauacuucgauu

SEQ ID NO: 311 - DNA, 21 bp, Artificial Sequence
  Synthetic construct
  misc_feature (1)..(14): 2'-O-methyl
  misc_feature (1)..(19): ribonucleotide modified as described
cguacgcggaauacuucgatt

SEQ ID NO: 312 - DNA, 21 bp, Artificial Sequence
  Synthetic construct
  misc_feature (1)..(10): 2'-O-methyl
  misc_feature (1)..(19): ribonucleotide modified as described
cguacgcggaauacuucgatt

SEQ ID NO: 313 - DNA, 21 bp, Artificial Sequence
  Synthetic construct
  misc_feature (1)..(5): 2'-O-methyl
  misc_feature (1)..(19): ribonucleotide modified as described
cguacgcggaauacuucgatt

SEQ ID NO: 314 - RNA, 21 nt, Artificial Sequence
  Synthetic construct
  misc_feature (1)..(21): 2'-O-methyl
ucgaaguauuccgcguacguu

SEQ ID NO: 315 - RNA, 21 nt, Artificial Sequence
  Synthetic construct
  misc_feature (1)..(2): 2'-O-methyl
  misc_feature (7)..(7): 2'-O-methyl
  misc_feature (9)..(12): 2'-O-methyl
  misc_feature (14)..(14): 2'-O-methyl
  misc_feature (16)..(16): 2'-O-methyl
  misc_feature (18)..(18): 2'-O-methyl
  misc_feature (20)..(21): 2'-O-methyl
ucgaaguauuccgcguacguu

SEQ ID NO: 316 - DNA, 21 bp, Artificial Sequence
  Synthetic construct
  misc_feature (1)..(14): 2'-O-methyl
  misc_feature (1)..(19): ribonucleotide modified as described
ucgaaguauuccgcguacgtt

SEQ ID NO: 317 - DNA, 21 bp, Artificial Sequence
  Synthetic construct
  misc_feature (1)..(10): 2'-O-methyl
  misc_feature (1)..(19): ribonucleotide modified as described
ucgaaguauuccgcguacgtt

SEQ ID NO: 318 - DNA, 21 bp, Artificial Sequence
  Synthetic construct
  misc_feature (1)..(5): 2'-O-methyl
  misc_feature (1)..(19): ribonucleotide modified as described
ucgaaguauuccgcguacgtt

SEQ ID NO: 319 - DNA, 21 bp, Artificial Sequence
  Synthetic construct
  misc_feature (1)..(1): 2'-O-methyl
  misc_feature (3)..(3): 2'-O-methyl
  misc_feature (5)..(5): 2'-O-methyl
  misc_feature (7)..(7): 2'-O-methyl
  misc_feature (12)..(12): 2'-O-methyl
  misc_feature (14)..(17): 2'-O-methyl
  misc_feature (1)..(19): ribonucleotide modified as described
cguacgcggaauacuucgatt

SEQ ID NO: 320 - RNA, 21 nt, Artificial Sequence
  Synthetic construct
  misc_feature (1)..(1): 2'-O-methyl
  misc_feature (3)..(3): 2'-O-methyl
  misc_feature (5)..(5): 2'-O-methyl
  misc_feature (7)..(7): 2'-O-methyl
  misc_feature (12)..(12): 2'-O-methyl
  misc_feature (14)..(17): 2'-O-methyl
  misc_feature (20)..(21): 2'-O-methyl
cguacgcggaauacuucgauu

SEQ ID NO: 321 - DNA, 21 bp, Artificial Sequence
  Synthetic construct
  misc_feature (20)..(20): Phosphorothioate 3'-Internucleotide Linkage
  misc_feature (1)..(19): ribonucleotide modified as described
cguacgcggaauacuucgatt

SEQ ID NO: 322 - DNA, 21 bp, Artificial Sequence
  Synthetic construct
  misc_feature (1)..(2): 2'-O-methyl
  misc_feature (7)..(7): 2'-O-methyl
  misc_feature (9)..(12): 2'-O-methyl
  misc_feature (14)..(14): 2'-O-methyl
  misc_feature (16)..(16): 2'-O-methyl
  misc_feature (18)..(18): 2'-O-methyl
  misc_feature (1)..(19): ribonucleotide modified as described
ucgaaguauuccgcguacgtt

SEQ ID NO: 323 - RNA, 21 nt, Artificial Sequence
  Synthetic construct
  misc_feature (20)..(21): n stands for 5-nitroindole universal base
cguacgcggaauacuucgann

SEQ ID NO: 324 - RNA, 21 nt, Artificial Sequence
  Synthetic construct
  misc_feature (20)..(21): n stands for 3-nitropyrrole universal base
cguacgcggaauacuucgann

SEQ ID NO: 325 - RNA, 21 nt, Artificial Sequence
  Synthetic construct
  misc_feature (20)..(21): n stands for 5-nitroindole universal base
ucgaaguauuccgcguacgnn

SEQ ID NO: 326 - RNA, 21 nt, Artificial Sequence
  Synthetic construct
  misc_feature (20)..(21): n stands for 3-nitropyrrole universal base
ucgaaguauuccgcguacgnn

SEQ ID NO: 327 - RNA, 6 nt, Artificial Sequence
  Synthetic construct
  misc_feature (1)..(4): Phosphorothioate 3'-Internucleotide Linkage
  misc_feature (1)..(1): 2'-deoxy-2'-fluoro
  misc_feature (3)..(3): 2'-deoxy-2'-fluoro
  misc_feature (5)..(5): 2'-deoxy-2'-fluoro
cguacg

SEQ ID NO: 328 - DNA, 15 bp, Artificial Sequence
  Synthetic construct
  misc_feature (1)..(1): 2'-deoxy-2'-fluoro
  misc_feature (6)..(6): 2'-deoxy-2'-fluoro
  misc_feature (8)..(11): 2'-deoxy-2'-fluoro
  misc_feature (11)..(14): Phosphorothioate 3'-Internucleotide Linkage
  misc_feature (1)..(13): ribonucleotide modified as described
cggaauacuucgatt

SEQ ID NO: 329 - DNA, 21 bp, Artificial Sequence
  Synthetic construct
  misc_feature (1)..(4): Phosphorothioate 3'-Internucleotide Linkage
  misc_feature (1)..(1): 2'-deoxy-2'-fluoro
  misc_feature (3)..(3): 2'-deoxy-2'-fluoro
  misc_feature (5)..(5): 2'-deoxy-2'-fluoro
  misc_feature (7)..(7): 2'-deoxy-2'-fluoro
  misc_feature (12)..(12): 2'-deoxy-2'-fluoro
  misc_feature (14)..(17): 2'-deoxy-2'-fluoro
  misc_feature (17)..(20): Phosphorothioate 3'-Internucleotide Linkage
  misc_feature (1)..(19): ribonucleotide modified as described
cguacgcggaauacuucgatt

SEQ ID NO: 330 - RNA, 8 nt, Artificial Sequence
  Synthetic construct
  misc_feature (1)..(4): Phosphorothioate 3'-Internucleotide Linkage
  misc_feature (1)..(2): 2'-deoxy-2'-fluoro
  misc_feature (7)..(7): 2'-deoxy-2'-fluoro
ucgaagua

SEQ ID NO: 331 - DNA, 13 bp, Artificial Sequence
  Synthetic construct
  misc_feature (1)..(4): 2'-deoxy-2'-fluoro
  misc_feature (8)..(8): 2'-deoxy-2'-fluoro
  misc_feature (9)..(12): Phosphorothioate 3'-Internucleotide Linkage
  misc_feature (10)..(10): 2'-deoxy-2'-fluoro
  misc_feature (13)..(13): n is a, c, g, or u
  misc_feature (1)..(11): ribonucleotide modified as described
uuccgcguacgtt

SEQ ID NO: 332 - DNA, 21 bp, Artificial Sequence
  Synthetic construct
  misc_feature (1)..(4): Phosphorothioate 3'-Internucleotide Linkage
  misc_feature (1)..(2): 2'-deoxy-2'-fluoro
  misc_feature (7)..(7): 2'-deoxy-2'-fluoro
  misc_feature (9)..(12): 2'-deoxy-2'-fluoro
  misc_feature (16)..(16): 2'-deoxy-2'-fluoro
  misc_feature (17)..(20): Phosphorothioate 3'-Internucleotide Linkage
  misc_feature (18)..(18): 2'-deoxy-2'-fluoro
  misc_feature (1)..(19): ribonucleotide modified as described
ucgaaguauuccgcguacgtt

SEQ ID NO: 333 - RNA, 6 nt, Artificial Sequence
  Synthetic construct
  misc_feature (1)..(1): 5'-thiophosphate
  misc_feature (1)..(1): 2'-deoxy-2'-fluoro
  misc_feature (3)..(3): 2'-deoxy-2'-fluoro
  misc_feature (5)..(5): 2'-deoxy-2'-fluoro
cguacg

SEQ ID NO: 334 - DNA, 15 bp, Artificial Sequence
  Synthetic construct
  misc_feature (1)..(1): 2'-deoxy-2'-fluoro
  misc_feature (6)..(6): 2'-deoxy-2'-fluoro
  misc_feature (8)..(11): 2'-deoxy-2'-fluoro
  misc_feature (1)..(13): ribonucleotide modified as described
cggaauacuucgatt

SEQ ID NO: 335 - DNA, 21 bp, Artificial Sequence
  Synthetic construct
  misc_feature (1)..(1): 5'-thiophosphate
  misc_feature (1)..(1): 2'-deoxy-2'-fluoro
  misc_feature (3)..(3): 2'-deoxy-2'-fluoro
  misc_feature (5)..(5): 2'-deoxy-2'-fluoro
  misc_feature (7)..(7): 2'-deoxy-2'-fluoro
  misc_feature (12)..(12): 2'-deoxy-2'-fluoro
  misc_feature (14)..(17): 2'-deoxy-2'-fluoro
  misc_feature (1)..(19): ribonucleotide modified as described
cguacgcggaauacuucgatt

SEQ ID NO: 336 - RNA, 8 nt, Artificial Sequence
  Synthetic construct
  misc_feature (1)..(1): 5'-thiophosphate
  misc_feature (1)..(2): 2'-deoxy-2'-fluoro
  misc_feature (7)..(7): 2'-deoxy-2'-fluoro
ucgaagua

SEQ ID NO: 337 - DNA, 13 bp, Artificial Sequence
  Synthetic construct
  misc_feature (1)..(4): 2'-deoxy-2'-fluoro
  misc_feature (8)..(8): 2'-deoxy-2'-fluoro
  misc_feature (10)..(10): 2'-deoxy-2'-fluoro
  misc_feature (1)..(11): ribonucleotide modified as described
uuccgcguacgtt

SEQ ID NO: 338 - DNA, 21 bp, Artificial Sequence
  Synthetic construct
  misc_feature (1)..(1): 5'-thiophosphate
  misc_feature (1)..(2): 2'-deoxy-2'-fluoro
  misc_feature (7)..(7): 2'-deoxy-2'-fluoro
  misc_feature (9)..(12): 2'-deoxy-2'-fluoro
  misc_feature (16)..(16): 2'-deoxy-2'-fluoro
  misc_feature (18)..(18): 2'-deoxy-2'-fluoro
  misc_feature (1)..(19): ribonucleotide modified as described
ucgaaguauuccgcguacgtt

SEQ ID NO: 339 - DNA, 21 bp, Artificial Sequence
  Synthetic construct
  misc_feature (1)..(4): Phosphorothioate 3'-Internucleotide Linkage
  misc_feature (3)..(6): 2'-deoxy-2'-fluoro
  misc_feature (8)..(8): 2'-deoxy-2'-fluoro
  misc_feature (13)..(13): 2'-deoxy-2'-fluoro
  misc_feature (15)..(15): 2'-deoxy-2'-fluoro
  misc_feature (17)..(17): 2'-deoxy-2'-fluoro
  misc_feature (17)..(20): Phosphorothioate 3'-Internucleotide Linkage
  misc_feature (19)..(19): 2'-deoxy-2'-fluoro
  misc_feature (1)..(19): ribonucleotide modified as described
agcuucauaaggcgcaugctt

SEQ ID NO: 340 - DNA, 21 bp, Artificial Sequence
  Synthetic construct
  misc_feature (1)..(4): Phosphorothioate 3'-Internucleotide Linkage
  misc_feature (2)..(2): 2'-deoxy-2'-fluoro
  misc_feature (4)..(4): 2'-deoxy-2'-fluoro
  misc_feature (6)..(6): 2'-deoxy-2'-fluoro
  misc_feature (8)..(11): 2'-deoxy-2'-fluoro
  misc_feature (13)..(13): 2'-deoxy-2'-fluoro
  misc_feature (17)..(20): Phosphorothioate 3'-Internucleotide Linkage
  misc_feature (18)..(19): 2'-deoxy-2'-fluoro
  misc_feature (1)..(19): ribonucleotide modified as described
gcaugcgccuuaugaagcutt

SEQ ID NO: 341 - DNA, 21 bp, Artificial Sequence
  Synthetic construct
  misc_feature (1)..(1): 5'-thiophosphate
  misc_feature (3)..(6): 2'-deoxy-2'-fluoro
  misc_feature (8)..(8): 2'-deoxy-2'-fluoro
  misc_feature (13)..(13): 2'-deoxy-2'-fluoro
  misc_feature (15)..(15): 2'-deoxy-2'-fluoro
  misc_feature (17)..(17): 2'-deoxy-2'-fluoro
  misc_feature (19)..(19): 2'-deoxy-2'-fluoro
  misc_feature (1)..(19): ribonucleotide modified as described
agcuucauaaggcgcaugctt

SEQ ID NO: 342 - DNA, 21 bp, Artificial Sequence
  Synthetic construct
  misc_feature (1)..(1): 5'-thiophosphate
  misc_feature (2)..(2): 2'-O-methyl
  misc_feature (4)..(4): 2'-O-methyl
  misc_feature (6)..(6): 2'-O-methyl
  misc_feature (8)..(11): 2'-O-methyl
  misc_feature (13)..(13): 2'-O-methyl
  misc_feature (18)..(19): 2'-O-methyl
  misc_feature (1)..(19): ribonucleotide modified as described
gcaugcgccuuaugaagcutt

SEQ ID NO: 343 - DNA, 21 bp, Artificial Sequence
  Synthetic construct
  misc_feature (1)..(1): 2'-O-methyl
  misc_feature (3)..(3): 2'-O-methyl
  misc_feature (5)..(5): 2'-O-methyl
  misc_feature (7)..(7): 2'-O-methyl
  misc_feature (12)..(12): 2'-O-methyl
  misc_feature (14)..(17): 2'-O-methyl
  misc_feature (1)..(19): ribonucleotide modified as described
cguacgcggaauacuucgatt

SEQ ID NO: 344 - DNA, 21 bp, Artificial Sequence
  Synthetic construct
  misc_feature (1)..(2): 2'-O-methyl
  misc_feature (7)..(7): 2'-O-methyl
  misc_feature (9)..(12): 2'-O-methyl
  misc_feature (14)..(14): 2'-O-methyl
  misc_feature (16)..(16): 2'-O-methyl
  misc_feature (18)..(18): 2'-O-methyl
  misc_feature (1)..(19): ribonucleotide modified as described
ucgaaguauuccgcguacgtt

SEQ ID NO: 345 - DNA, 21 bp, Artificial Sequence
  Synthetic construct
  misc_feature (1)..(2): 2'-O-methyl
  misc_feature (1)..(4): Phosphorothioate 3'-Internucleotide Linkage
  misc_feature (6)..(8): 2'-O-methyl
  misc_feature (15)..(15): 2'-O-methyl
  misc_feature (17)..(19): 2'-O-methyl
  misc_feature (17)..(20): Phosphorothioate 3'-Internucleotide Linkage
  misc_feature (1)..(19): ribonucleotide modified as described
cugaguuuaaaaggcaccctt

SEQ ID NO: 346 - DNA, 21 bp, Artificial Sequence
  Synthetic construct
  misc_feature (1)..(1): 2'-O-methyl
  misc_feature (1)..(4): Phosphorothioate 3'-Internucleotide Linkage
  misc_feature (4)..(5): 2'-O-methyl
  misc_feature (7)..(7): 2'-O-methyl
  misc_feature (12)..(12): 2'-O-methyl
  misc_feature (14)..(14): 2'-O-methyl
  misc_feature (17)..(17): 2'-O-methyl
  misc_feature (17)..(20): Phosphorothioate 3'-Internucleotide Linkage
  misc_feature (1)..(19): ribonucleotide modified as described
caaccacaaaauacaacaatt

SEQ ID NO: 347 - DNA, 21 bp, Artificial Sequence
  Synthetic construct
  misc_feature (1)..(3): 2'-O-methyl
  misc_feature (1)..(4): Phosphorothioate 3'-Internucleotide Linkage
  misc_feature (12)..(13): 2'-O-methyl
  misc_feature (17)..(20): Phosphorothioate 3'-Internucleotide Linkage
  misc_feature (18)..(19): 2'-O-methyl
  misc_feature (1)..(19): ribonucleotide modified as described
ccuggaaagaaucaaaacctt

SEQ ID NO: 348 - DNA, 21 bp, Artificial Sequence
  Synthetic construct
  misc_feature (1)..(4): Phosphorothioate 3'-Internucleotide Linkage
  misc_feature (2)..(2): 2'-O-methyl
  misc_feature (11)..(15): 2'-O-methyl
  misc_feature (17)..(20): Phosphorothioate 3'-Internucleotide Linkage
  misc_feature (18)..(18): 2'-O-methyl
  misc_feature (1)..(19): ribonucleotide modified as described
gcaaggagggccucugaugtt

SEQ ID NO: 349 - DNA, 21 bp, Artificial Sequence
  Synthetic construct
  misc_feature (1)..(1): 2'-deoxy-2'-amino
  misc_feature (3)..(3): 2'-deoxy-2'-amino
  misc_feature (5)..(5): 2'-deoxy-2'-amino
  misc_feature (7)..(7): 2'-deoxy-2'-amino
  misc_feature (12)..(12): 2'-deoxy-2'-amino
  misc_feature (14)..(17): 2'-deoxy-2'-amino
  misc_feature (1)..(19): ribonucleotide modified as described
cguacgcggaauacuucgatt

SEQ ID NO: 350 - DNA, 21 bp, Artificial Sequence
  Synthetic construct
  misc_feature (1)..(2): 2'-deoxy-2'-amino
  misc_feature (7)..(7): 2'-deoxy-2'-amino
  misc_feature (9)..(12): 2'-deoxy-2'-amino
  misc_feature (14)..(14): 2'-deoxy-2'-amino
  misc_feature (16)..(16): 2'-deoxy-2'-amino
  misc_feature (18)..(18): 2'-deoxy-2'-amino
  misc_feature (1)..(19): ribonucleotide modified as described
ucgaaguauuccgcguacgtt

SEQ ID NO: 351 - DNA, 21 bp, Artificial Sequence
  Synthetic construct
  misc_feature (1)..(1): 2'-deoxy-2'-amino
  misc_feature (3)..(3): 2'-deoxy-2'-amino
  misc_feature (5)..(5): 2'-deoxy-2'-amino
  misc_feature (7)..(7): 2'-deoxy-2'-amino
  misc_feature (12)..(12): 2'-deoxy-2'-amino
  misc_feature (14)..(17): 2'-deoxy-2'-amino
  misc_feature (20)..(20): 2'-deoxy-2'-amino
  misc_feature (1)..(20): ribonucleotide modified as described
cguacgcggaauacuucgaut

SEQ ID NO: 352 - DNA, 21 bp, Artificial Sequence
  Synthetic construct
  misc_feature (1)..(2): 2'-deoxy-2'-amino
  misc_feature (7)..(7): 2'-deoxy-2'-amino
  misc_feature (9)..(12): 2'-deoxy-2'-amino
  misc_feature (14)..(14): 2'-deoxy-2'-amino
  misc_feature (16)..(16): 2'-deoxy-2'-amino
  misc_feature (18)..(18): 2'-deoxy-2'-amino
  misc_feature (20)..(20): 2'-deoxy-2'-amino
  misc_feature (1)..(20): ribonucleotide modified as described
ucgaaguauuccgcguacgut

SEQ ID NO: 353 - DNA, 21 bp, Artificial Sequence
  Synthetic construct
  misc_feature (1)..(1): 5'-3 attached terminal deoxyabasic moiety
  misc_feature (1)..(5): Phosphorothioate 3'-Internucleotide Linkage
  misc_feature (20)..(21): n stands for 5-nitroindole universal base
  misc_feature (21)..(21): 3'-3 attached terminal deoxyabasic moiety
ccccgggaggucucguagann

SEQ ID NO: 354 - DNA, 21 bp, Artificial Sequence
  Synthetic construct
  misc_feature (1)..(1): 5'-3 attached terminal deoxyabasic moiety
  misc_feature (1)..(5): Phosphorothioate 3'-Internucleotide Linkage
  misc_feature (20)..(21): n stands for 5-nitroindole universal base
  misc_feature (21)..(21): 3'-3 attached terminal deoxyabasic moiety
agaugcucuggagggccccnn

SEQ ID NO: 355 - DNA, 21 bp, Artificial Sequence
  Synthetic construct
  misc_feature (1)..(5): Phosphorothioate 3'-Internucleotide Linkage
  misc_feature (20)..(21): n stands for 5-nitroindole universal base
  misc_feature (21)..(21): 3'-3 attached terminal deoxyabasic moiety
ucuacgagaccucccggggnn

SEQ ID NO: 356 - DNA, 21 bp, Artificial Sequence
  Synthetic construct
  misc_feature (1)..(5): Phosphorothioate 3'-Internucleotide Linkage
  misc_feature (20)..(21): n stands for 5-nitroindole universal base
  misc_feature (21)..(21): 3'-3 attached terminal deoxyabasic moiety
ggggcccuccagagcaucunn

SEQ ID NO: 357 - DNA, 21 bp, Artificial Sequence
  Synthetic construct
  misc_feature (1)..(1): 5'-3 attached terminal deoxyabasic moiety
  misc_feature (1)..(4): Phosphorothioate 3'-Internucleotide Linkage
  misc_feature (11)..(14): Phosphorothioate 3'-Internucleotide Linkage
  misc_feature (16)..(16): Phosphorothioate 3'-Internucleotide Linkage
  misc_feature (20)..(21): n stands for 5-nitroindole universal base
  misc_feature (21)..(21): 3'-3 attached terminal deoxyabasic moiety
ccccgggaggucucguagann

SEQ ID NO: 358 - DNA, 21 bp, Artificial Sequence
  Synthetic construct
  misc_feature (1)..(1): 5'-3 attached terminal deoxyabasic moiety
  misc_feature (4)..(4): Phosphorothioate 3'-Internucleotide Linkage
  misc_feature (6)..(9): Phosphorothioate 3'-Internucleotide Linkage
  misc_feature (16)..(19): Phosphorothioate 3'-Internucleotide Linkage
  misc_feature (20)..(21): n stands for 5-nitroindole universal base
  misc_feature (21)..(21): 3'-3 attached terminal deoxyabasic moiety
agaugcucuggagggccccnn

SEQ ID NO: 359 - DNA, 21 bp, Artificial Sequence
  Synthetic construct
  misc_feature (1)..(3): Phosphorothioate 3'-Internucleotide Linkage
  misc_feature (5)..(5): Phosphorothioate 3'-Internucleotide Linkage
  misc_feature (10)..(15): Phosphorothioate 3'-Internucleotide Linkage
  misc_feature (20)..(21): n stands for 5-nitroindole universal base
  misc_feature (21)..(21): 3'-3 attached terminal deoxyabasic moiety
ucuacgagaccucccggggnn

SEQ ID NO: 360 - DNA, 21 bp, Artificial Sequence
  Synthetic construct
  misc_feature (5)..(10): Phosphorothioate 3'-Internucleotide Linkage
  misc_feature (15)..(15): Phosphorothioate 3'-Internucleotide Linkage
  misc_feature (17)..(19): Phosphorothioate 3'-Internucleotide Linkage
  misc_feature (20)..(21): n stands for 5-nitroindole universal base
  misc_feature (21)..(21): 3'-3 attached terminal deoxyabasic moiety
ggggcccuccagagcaucunn

SEQ ID NO: 361 - DNA, 21 bp, Artificial Sequence
  Synthetic construct
  misc_feature (1)..(4): 2'-O-methyl
  misc_feature (1)..(1): 5'-3 attached terminal deoxyabasic moiety
  misc_feature (1)..(4): Phosphorothioate 3'-Internucleotide Linkage
  misc_feature (11)..(14): 2'-O-methyl
  misc_feature (16)..(16): 2'-O-methyl
  misc_feature (17)..(19): Phosphorothioate 3'-Internucleotide Linkage
  misc_feature (20)..(21): n stands for 5-nitroindole universal base
  misc_feature (21)..(21): 3'-3 attached terminal deoxyabasic moiety
ccccgggaggucucguagann

SEQ ID NO: 362 - DNA, 21 bp, Artificial Sequence
  Synthetic construct
  misc_feature (1)..(1): 5'-3 attached terminal deoxyabasic moiety
  misc_feature (1)..(4): Phosphorothioate 3'-Internucleotide Linkage
  misc_feature (4)..(4): 2'-O-methyl
  misc_feature (6)..(9): 2'-O-methyl
  misc_feature (16)..(19): 2'-O-methyl
  misc_feature (17)..(19): Phosphorothioate 3'-Internucleotide Linkage
  misc_feature (20)..(21): n stands for 5-nitroindole universal base
  misc_feature (21)..(21): 3'-3 attached terminal deoxyabasic moiety
agaugcucuggagggccccnn

SEQ ID NO: 363 - DNA, 21 bp, Artificial Sequence
  Synthetic construct
  misc_feature (1)..(4): 2'-deoxy-2'-fluoro
  misc_feature (1)..(1): 5'-3 attached terminal deoxyabasic moiety
  misc_feature (11)..(14): 2'-deoxy-2'-fluoro
  misc_feature (16)..(16): 2'-deoxy-2'-fluoro
  misc_feature (20)..(21): n stands for 5-nitroindole universal base
  misc_feature (21)..(21): 3'-3 attached terminal deoxyabasic moiety
ccccgggaggucucguagann

SEQ ID NO: 364 - DNA, 21 bp, Artificial Sequence
  Synthetic construct
  misc_feature (1)..(1): 5'-3 attached terminal deoxyabasic moiety
  misc_feature (4)..(4): 2'-deoxy-2'-fluoro
  misc_feature (6)..(9): 2'-deoxy-2'-fluoro
  misc_feature (16)..(19): 2'-deoxy-2'-fluoro
  misc_feature (20)..(21): n stands for 5-nitroindole universal base
  misc_feature (21)..(21): 3'-3 attached terminal deoxyabasic moiety
agaugcucuggagggccccnn

SEQ ID NO: 365 - DNA, 21 bp, Artificial Sequence
  Synthetic construct
  misc_feature (1)..(1): 5'-3 attached terminal deoxyabasic moiety
  misc_feature (1)..(3): Phosphorothioate 3'-Internucleotide Linkage
  misc_feature (5)..(5): Phosphorothioate 3'-Internucleotide Linkage
  misc_feature (10)..(15): Phosphorothioate 3'-Internucleotide Linkage
  misc_feature (20)..(21): n stands for 5-nitroindole universal base
  misc_feature (21)..(21): 3'-3 attached terminal deoxyabasic moiety
ucuacgagaccucccggggnn

SEQ ID NO: 366 - RNA, 19 nt, Artificial Sequence
  Synthetic construct
  misc_feature (1)..(3): 2'-deoxy-2'-fluoro
  misc_feature (5)..(5): 2'-deoxy-2'-fluoro
  misc_feature (10)..(15): 2'-deoxy-2'-fluoro
ucuacgagaccucccgggg

SEQ ID NO: 367 - RNA, 19 nt, Artificial Sequence
  Synthetic construct
  misc_feature (5)..(10): 2'-deoxy-2'-fluoro
  misc_feature (15)..(15): 2'-deoxy-2'-fluoro
  misc_feature (17)..(19): 2'-deoxy-2'-fluoro
ggggcccuccagagcaucu

SEQ ID NO: 368 - RNA, 21 nt, Artificial Sequence
  Synthetic construct
  misc_feature (1)..(3): 2'-deoxy-2'-fluoro
  misc_feature (5)..(5): 2'-deoxy-2'-fluoro
  misc_feature (10)..(15): 2'-deoxy-2'-fluoro
  misc_feature (20)..(21): n stands for 5-nitroindole universal base
ucuacgagaccucccggggnn

SEQ ID NO: 369 - RNA, 21 nt, Artificial Sequence
  Synthetic construct
  misc_feature (5)..(10): 2'-deoxy-2'-fluoro
  misc_feature (15)..(15): 2'-deoxy-2'-fluoro
  misc_feature (17)..(19): 2'-deoxy-2'-fluoro
  misc_feature (20)..(21): n stands for 5-nitroindole universal base
ggggcccuccagagcaucunn

SEQ ID NO: 370 - RNA, 21 nt, Artificial Sequence
  Synthetic construct
  misc_feature (1)..(3): 2'-deoxy-2'-fluoro
  misc_feature (1)..(1): 5'-3 attached terminal deoxyabasic moiety
  misc_feature (5)..(5): 2'-deoxy-2'-fluoro
  misc_feature (10)..(15): 2'-deoxy-2'-fluoro
  misc_feature (20)..(21): n stands for 5-nitroindole universal base
  misc_feature (21)..(21): 3'-3 attached terminal deoxyabasic moiety
ucuacgagaccucccggggnn

SEQ ID NO: 371 - RNA, 21 nt, Artificial Sequence
  Synthetic construct
  misc_feature (1)..(4): Phosphorothioate 3'-Internucleotide Linkage
  misc_feature (11)..(14): Phosphorothioate 3'-Internucleotide Linkage
  misc_feature (16)..(16): Phosphorothioate 3'-Internucleotide Linkage
  misc_feature (20)..(21): n stands for 5-nitroindole universal base
  misc_feature (21)..(21): 3'-3 attached terminal deoxyabasic moiety
ccccgggaggucucguagann

SEQ ID NO: 372 - DNA, 21 bp, Artificial Sequence
  Synthetic construct
  misc_feature (1)..(1): 2'-deoxy-2'-fluoro
  misc_feature (1)..(1): 5'-3 attached terminal deoxyabasic moiety
  misc_feature (3)..(3): 2'-deoxy-2'-fluoro
  misc_feature (5)..(5): 2'-deoxy-2'-fluoro
  misc_feature (7)..(7): 2'-deoxy-2'-fluoro
  misc_feature (12)..(12): 2'-deoxy-2'-fluoro
  misc_feature (14)..(17): 2'-deoxy-2'-fluoro
  misc_feature (1)..(19): ribonucleotide modified as described
  misc_feature (21)..(21): 3'-3 attached terminal deoxyabasic moiety
cguacgcggaauacuucgatt

SEQ ID NO: 373 - DNA, 21 bp, Artificial Sequence
  Synthetic construct
  misc_feature (1)..(1): 2'-O-methyl
  misc_feature (1)..(1): 5'-3 attached terminal deoxyabasic moiety
  misc_feature (3)..(3): 2'-O-methyl
  misc_feature (5)..(5): 2'-O-methyl
  misc_feature (7)..(7): 2'-O-methyl
  misc_feature (12)..(12): 2'-O-methyl
  misc_feature (14)..(17): 2'-O-methyl
  misc_feature (1)..(19): ribonucleotide modified as described
  misc_feature (21)..(21): 3'-3 attached terminal deoxyabasic moiety
cguacgcggaauacuucgatt

SEQ ID NO: 374 - DNA, 21 bp, Artificial Sequence
  Synthetic construct
  misc_feature (1)..(2): 2'-deoxy-2'-fluoro
  misc_feature (7)..(7): 2'-deoxy-2'-fluoro
  misc_feature (9)..(12): 2'-deoxy-2'-fluoro
  misc_feature (14)..(14): 2'-deoxy-2'-fluoro
  misc_feature (16)..(16): 2'-deoxy-2'-fluoro
  misc_feature (18)..(18): 2'-deoxy-2'-fluoro
  misc_feature (1)..(19): ribonucleotide modified as described
  misc_feature (20)..(20): Phosphorothioate 3'-Internucleotide Linkage
ucgaaguauuccgcguacgtt

SEQ ID NO: 375 - DNA, 21 bp, Artificial Sequence
  Synthetic construct
  misc_feature (1)..(2): 2'-deoxy-2'-fluoro
  misc_feature (3)..(6): 2'-O-methyl
  misc_feature (7)..(7): 2'-deoxy-2'-fluoro
  misc_feature (8)..(8): 2'-O-methyl
  misc_feature (9)..(12): 2'-deoxy-2'-fluoro
  misc_feature (13)..(13): 2'-O-methyl
  misc_feature (14)..(14): 2'-deoxy-2'-fluoro
  misc_feature (15)..(15): 2'-O-methyl
  misc_feature (16)..(16): 2'-deoxy-2'-fluoro
  misc_feature (17)..(17): 2'-O-methyl
  misc_feature (18)..(18): 2'-deoxy-2'-fluoro
  misc_feature (19)..(19): 2'-O-methyl
  misc_feature (1)..(19): ribonucleotide modified as described
  misc_feature (20)..(20): Phosphorothioate 3'-Internucleotide Linkage
ucgaaguauuccgcguacgtt

SEQ ID NO: 376 - DNA, 21 bp, Artificial Sequence
  Synthetic construct
  misc_feature (1)..(1): 2'-deoxy-2'-fluoro
  misc_feature (1)..(1): 5'-3 attached terminal deoxyabasic moiety
  misc_feature (2)..(2): 2'-O-methyl
  misc_feature (3)..(3): 2'-deoxy-2'-fluoro
  misc_feature (4)..(4): 2'-O-methyl
  misc_feature (5)..(5): 2'-deoxy-2'-fluoro
  misc_feature (6)..(6): 2'-O-methyl
  misc_feature (7)..(7): 2'-deoxy-2'-fluoro
  misc_feature (8)..(11): 2'-O-methyl
  misc_feature (12)..(12): 2'-deoxy-2'-fluoro
  misc_feature (13)..(13): 2'-O-methyl
  misc_feature (14)..(17): 2'-deoxy-2'-fluoro
  misc_feature (18)..(19): 2'-O-methyl
  misc_feature (1)..(19): ribonucleotide modified as described
  misc_feature (21)..(21): 3'-3 attached terminal deoxyabasic moiety
cguacgcggaauacuucgatt

SEQ ID NO: 377 - DNA, 21 bp, Artificial Sequence
  Synthetic construct
  misc_feature (1)..(1): 2'-deoxy-2'-fluoro
  misc_feature (1)..(1): 5'-3 attached terminal deoxyabasic moiety
  misc_feature (2)..(2): 2'-deoxy
  misc_feature (3)..(3): 2'-deoxy-2'-fluoro
  misc_feature (4)..(4): 2'-deoxy
  misc_feature (5)..(5): 2'-deoxy-2'-fluoro
  misc_feature (6)..(6): 2'-deoxy
  misc_feature (7)..(7): 2'-deoxy-2'-fluoro
  misc_feature (8)..(11): 2'-deoxy
  misc_feature (12)..(12): 2'-deoxy-2'-fluoro
  misc_feature (13)..(13): 2'-deoxy
  misc_feature (14)..(17): 2'-deoxy-2'-fluoro
  misc_feature (18)..(19): 2'-deoxy
  misc_feature (1)..(19): ribonucleotide modified as described
  misc_feature (21)..(21): 3'-3 attached terminal deoxyabasic moiety
cguacgcggaauacuucgatt

SEQ ID NO: 378 - DNA, 21 bp, Artificial Sequence
  Synthetic construct
  misc_feature (1)..(2): 2'-deoxy-2'-fluoro
  misc_feature (7)..(7): 2'-deoxy-2'-fluoro
  misc_feature (9)..(12): 2'-deoxy-2'-fluoro
  misc_feature (14)..(14): 2'-deoxy-2'-fluoro
  misc_feature (16)..(16): 2'-deoxy-2'-fluoro
  misc_feature (18)..(18): 2'-deoxy-2'-fluoro
  misc_feature (1)..(19): ribonucleotide modified as described
  misc_feature (20)..(20): Phosphorothioate 3'-Internucleotide Linkage
  misc_feature (21)..(21): n stands for 3'-deoxythymidine
ucgaaguauuccgcguacgtt

SEQ ID NO: 379 - DNA, 20 bp, Artificial Sequence
  Synthetic construct
  misc_feature (1)..(2): 2'-deoxy-2'-fluoro
  misc_feature (7)..(7): 2'-deoxy-2'-fluoro
  misc_feature (9)..(12): 2'-deoxy-2'-fluoro
  misc_feature (14)..(14): 2'-deoxy-2'-fluoro
  misc_feature (16)..(16): 2'-deoxy-2'-fluoro
  misc_feature (18)..(18): 2'-deoxy-2'-fluoro
  misc_feature (1)..(19): ribonucleotide modified as described
  misc_feature (20)..(20): 3'-3 attached terminal glyceryl moiety
ucgaaguauuccgcguacgt

SEQ ID NO: 380 - DNA, 21 bp, Artificial Sequence
  Synthetic construct
  misc_feature (1)..(2): 2'-deoxy-2'-fluoro
  misc_feature (7)..(7): 2'-deoxy-2'-fluoro
  misc_feature (9)..(12): 2'-deoxy-2'-fluoro
  misc_feature (14)..(14): 2'-deoxy-2'-fluoro
  misc_feature (16)..(16): 2'-deoxy-2'-fluoro
  misc_feature (18)..(18): 2'-deoxy-2'-fluoro
  misc_feature (1)..(19): ribonucleotide modified as described
  misc_feature (21)..(21): 3'-3 attached terminal glyceryl moiety
ucgaaguauuccgcguacgtt

SEQ ID NO: 381 - DNA, 21 bp, Artificial Sequence
  Synthetic construct
  misc_feature (1)..(1): 5'-3 attached terminal deoxyabasic moiety
  misc_feature (3)..(6): 2'-O-methyl
  misc_feature (8)..(8): 2'-O-methyl
  misc_feature (13)..(13): 2'-O-methyl
  misc_feature (15)..(15): 2'-O-methyl
  misc_feature (17)..(17): 2'-O-methyl
  misc_feature (19)..(19): 2'-O-methyl
  misc_feature (1)..(19): ribonucleotide modified as described
  misc_feature (21)..(21): 3'-3 attached terminal deoxyabasic moiety
agcuucauaaggcgcaugctt

SEQ ID NO: 382 - DNA, 21 bp, Artificial Sequence
  Synthetic construct
  misc_feature (1)..(1): 5'-3 attached terminal deoxyabasic moiety
  misc_feature (3)..(6): 2'-deoxy-2'-fluoro
  misc_feature (8)..(8): 2'-deoxy-2'-fluoro
  misc_feature (13)..(13): 2'-deoxy-2'-fluoro
  misc_feature (15)..(15): 2'-deoxy-2'-fluoro
  misc_feature (17)..(17): 2'-deoxy-2'-fluoro
  misc_feature (19)..(19): 2'-deoxy-2'-fluoro
  misc_feature (1)..(19): ribonucleotide modified as described
  misc_feature (21)..(21): 3'-3 attached terminal deoxyabasic moiety
agcuucauaaggcgcaugctt

SEQ ID NO: 383 - DNA, 21 bp, Artificial Sequence
  Synthetic construct
  misc_feature (2)..(2): 2'-deoxy-2'-fluoro
  misc_feature (4)..(4): 2'-deoxy-2'-fluoro
  misc_feature (6)..(6): 2'-deoxy-2'-fluoro
  misc_feature (8)..(11): 2'-deoxy-2'-fluoro
  misc_feature (13)..(13): 2'-deoxy-2'-fluoro
  misc_feature (18)..(19): 2'-deoxy-2'-fluoro
  misc_feature (1)..(19): ribonucleotide modified as described
  misc_feature (20)..(20): Phosphorothioate 3'-Internucleotide Linkage
gcaugcgccuuaugaagcutt

SEQ ID NO: 384 - DNA, 21 bp, Artificial Sequence
  Synthetic construct
  misc_feature (1)..(7): 2'-O-methyl
  misc_feature (1)..(1): 5'-3 attached terminal deoxyabasic moiety
  misc_feature (12)..(12): 2'-O-methyl
  misc_feature (14)..(19): 2'-O-methyl
  misc_feature (1)..(19): ribonucleotide modified as described
  misc_feature (21)..(21): 3'-3 attached terminal deoxyabasic moiety
cguacgcggaauacuucgatt

SEQ ID NO: 385 - DNA, 21 bp, Artificial Sequence
  Synthetic construct
  misc_feature (1)..(1): 2'-O-methyl
  misc_feature (1)..(1): 5'-3 attached terminal deoxyabasic moiety
  misc_feature (3)..(3): 2'-O-methyl
  misc_feature (5)..(5): 2'-O-methyl
  misc_feature (7)..(7): 2'-O-methyl
  misc_feature (12)..(12): 2'-O-methyl
  misc_feature (14)..(17): 2'-O-methyl
  misc_feature (1)..(19): ribonucleotide modified as described
  misc_feature (21)..(21): 3'-3 attached terminal deoxyabasic moiety
cguacgcggaauacuucgatt

SEQ ID NO: 386 - DNA, 21 bp, Artificial Sequence
  Synthetic construct
  misc_feature (1)..(2): 2'-O-methyl
  misc_feature (7)..(7): 2'-O-methyl
  misc_feature (9)..(12): 2'-O-methyl
  misc_feature (14)..(14): 2'-O-methyl
  misc_feature (16)..(16): 2'-O-methyl
  misc_feature (18)..(18): 2'-O-methyl
  misc_feature (20)..(20): 3'-deoxy thymidine
  misc_feature (1)..(19): ribonucleotide modified as described
ucgaaguauuccgcguacgtt

SEQ ID NO: 387 - DNA, 21 bp, Artificial Sequence
  Synthetic construct
  misc_feature (1)..(2): 2'-O-methyl
  misc_feature (7)..(7): 2'-O-methyl
  misc_feature (9)..(12): 2'-O-methyl
  misc_feature (14)..(14): 2'-O-methyl
  misc_feature (16)..(16): 2'-O-methyl
  misc_feature (18)..(18): 2'-O-methyl
  misc_feature (1)..(19): ribonucleotide modified as described
  misc_feature (21)..(21): dideoxy cytidine
ucgaaguauuccgcguacgtc

SEQ ID NO: 388 - DNA, 20 bp, Artificial Sequence
  Synthetic construct
  misc_feature (1)..(2): 2'-O-methyl
  misc_feature (7)..(7): 2'-O-methyl
  misc_feature (9)..(12): 2'-O-methyl
  misc_feature (14)..(14): 2'-O-methyl
  misc_feature (16)..(16): 2'-O-methyl
  misc_feature (18)..(18): 2'-O-methyl
  misc_feature (1)..(19): ribonucleotide modified as described
  misc_feature (20)..(20): inverted thymidine
ucgaaguauuccgcguacgt

SEQ ID NO: 389 - DNA, 21 bp, Artificial Sequence
  Synthetic construct
  misc_feature (1)..(2): 2'-O-methyl
  misc_feature (7)..(7): 2'-O-methyl
  misc_feature (9)..(12): 2'-O-methyl
  misc_feature (14)..(14): 2'-O-methyl
  misc_feature (16)..(16): 2'-O-methyl
  misc_feature (18)..(18): 2'-O-methyl
  misc_feature (1)..(19): ribonucleotide modified as described
  misc_feature (21)..(21): inverted thymidine
ucgaaguauuccgcguacgtt

SEQ ID NO: 390 - DNA, 21 bp, Artificial Sequence
  Synthetic construct
  misc_feature (1)..(1): 2'-deoxy-2'-fluoro
  misc_feature (1)..(1): 5'-3 attached terminal deoxyabasic moiety
  misc_feature (4)..(5): 2'-deoxy-2'-fluoro
  misc_feature (7)..(7): 2'-deoxy-2'-fluoro
  misc_feature (12)..(12): 2'-deoxy-2'-fluoro
  misc_feature (14)..(14): 2'-deoxy-2'-fluoro
  misc_feature (17)..(17): 2'-deoxy-2'-fluoro
  misc_feature (1)..(19): ribonucleotide modified as described
  misc_feature (21)..(21): 3'-3 attached terminal deoxyabasic moiety
caaccacaaaauacaacaatt

SEQ ID NO: 391 - DNA, 21 bp, Artificial Sequence
  Synthetic construct
  misc_feature (1)..(2): 2'-deoxy-2'-fluoro
  misc_feature (4)..(5): 2'-deoxy-2'-fluoro
  misc_feature (7)..(7): 2'-deoxy-2'-fluoro
  misc_feature (9)..(12): 2'-deoxy-2'-fluoro
  misc_feature (14)..(14): 2'-deoxy-2'-fluoro
  misc_feature (17)..(18): 2'-deoxy-2'-fluoro
  misc_feature (1)..(19): ribonucleotide modified as described
  misc_feature (20)..(20): Phosphorothioate 3'-Internucleotide Linkage
uuguuguauuuugugguugtt

SEQ ID NO: 392 - RNA, 21 nt, Artificial Sequence
  Synthetic construct
  misc_feature (1)..(1): 5'-3 attached terminal deoxyabasic moiety
  misc_feature (1)..(1): 2'-deoxy-2'-fluoro
  misc_feature (5)..(12): 2'-deoxy-2'-fluoro
  misc_feature (15)..(20): 2'-deoxy-2'-fluoro
  misc_feature (21)..(21): 3'-3 attached terminal deoxyabasic moiety
uggacuucucucaauuuucua

SEQ ID NO: 393 - DNA, 21 bp, Artificial Sequence
  Synthetic construct
  misc_feature (6)..(7): 2'-deoxy-2'-fluoro
  misc_feature (16)..(18): 2'-deoxy-2'-fluoro
  misc_feature (1)..(19): ribonucleotide modified as described
  misc_feature (20)..(20): Phosphorothioate 3'-Internucleotide Linkage
gaaaauugagagaaguccatt

SEQ ID NO: 394 - RNA, 21 nt, Artificial Sequence
  Synthetic construct
  misc_feature (1)..(1): 5'-3 attached terminal deoxyabasic moiety
  misc_feature (2)..(7): 2'-deoxy-2'-fluoro
  misc_feature (10)..(17): 2'-deoxy-2'-fluoro
  misc_feature (21)..(21): 2'-deoxy-2'-fluoro
  misc_feature (21)..(21): 3'-3 attached terminal deoxyabasic moiety
aucuuuuaacucucuucaggu

SEQ ID NO: 395 - DNA, 21 bp, Artificial Sequence
  Synthetic construct
  misc_feature (2)..(4): 2'-deoxy-2'-fluoro
  misc_feature (13)..(14): 2'-deoxy-2'-fluoro
  misc_feature (1)..(19): ribonucleotide modified as described
  misc_feature (20)..(20): Phosphorothioate 3'-Internucleotide Linkage
accugaagagaguuaaaagtt

SEQ ID NO: 396 - RNA, 21 nt, Artificial Sequence
  Synthetic construct
  misc_feature (1)..(1): 5'-3 attached terminal deoxyabasic moiety
  misc_feature (1)..(1): 2'-deoxy-2'-fluoro
  misc_feature (3)..(3): 2'-deoxy-2'-fluoro
  misc_feature (6)..(7): 2'-deoxy-2'-fluoro
  misc_feature (9)..(9): 2'-deoxy-2'-fluoro
  misc_feature (12)..(12): 2'-deoxy-2'-fluoro
  misc_feature (14)..(17): 2'-deoxy-2'-fluoro
  misc_feature (19)..(20): 2'-deoxy-2'-fluoro
  misc_feature (21)..(21): 3'-3 attached terminal deoxyabasic moiety
ugugucugcggcguuuuauca

SEQ ID NO: 397 - DNA, 21 bp, Artificial Sequence
  Synthetic construct
  misc_feature (2)..(2): 2'-deoxy-2'-fluoro
  misc_feature (7)..(7): 2'-deoxy-2'-fluoro
  misc_feature (9)..(10): 2'-deoxy-2'-fluoro
  misc_feature (12)..(12): 2'-deoxy-2'-fluoro
  misc_feature (16)..(16): 2'-deoxy-2'-fluoro
  misc_feature (18)..(18): 2'-deoxy-2'-fluoro
  misc_feature (1)..(19): ribonucleotide modified as described
  misc_feature (20)..(20): Phosphorothioate 3'-Internucleotide Linkage
auaaaacgccgcagacacatt

SEQ ID NO: 398 - RNA, 21 nt, Artificial Sequence
  Synthetic construct
  misc_feature (2)..(3): 2'-deoxy-2'-fluoro
  misc_feature (5)..(8): 2'-deoxy-2'-fluoro
  misc_feature (10)..(10): 2'-deoxy-2'-fluoro
  misc_feature (13)..(13): 2'-deoxy-2'-fluoro
  misc_feature (15)..(17): 2'-deoxy-2'-fluoro
  misc_feature (19)..(19): 2'-deoxy-2'-fluoro
  misc_feature (21)..(21): 3'-3 attached terminal deoxyabasic moiety
  misc_feature (21)..(21): 2'-deoxy-2'-fluoro
acuauuuugcggcgucugugu

SEQ ID NO: 399 - DNA, 21 bp, Artificial Sequence
  Synthetic construct
  misc_feature (2)..(2): 2'-deoxy-2'-fluoro
  misc_feature (4)..(4): 2'-deoxy-2'-fluoro
  misc_feature (8)..(8): 2'-deoxy-2'-fluoro
  misc_feature (10)..(11): 2'-deoxy-2'-fluoro
  misc_feature (13)..(13): 2'-deoxy-2'-fluoro
  misc_feature (18)..(18): 2'-deoxy-2'-fluoro
  misc_feature (1)..(19): ribonucleotide modified as described
  misc_feature (20)..(20): Phosphorothioate 3'-Internucleotide Linkage
acacagacgccgcaaaauatt

SEQ ID NO: 400 - RNA, 21 nt, Artificial Sequence
  Synthetic construct
  misc_feature (1)..(1): 5'-3 attached terminal deoxyabasic moiety
  misc_feature (1)..(4): 2'-deoxy-2'-fluoro
  misc_feature (6)..(7): 2'-deoxy-2'-fluoro
  misc_feature (9)..(10): 2'-deoxy-2'-fluoro
  misc_feature (12)..(12): 2'-deoxy-2'-fluoro
  misc_feature (14)..(17): 2'-deoxy-2'-fluoro
  misc_feature (19)..(21): 2'-deoxy-2'-fluoro
  misc_feature (21)..(21): 3'-3 attached terminal deoxyabasic moiety
uccugcugcuaugccucaucu

SEQ ID NO: 401 - DNA, 21 bp, Artificial Sequence
  Synthetic construct
  misc_feature (2)..(2): 2'-deoxy-2'-fluoro
  misc_feature (7)..(7): 2'-deoxy-2'-fluoro
  misc_feature (9)..(9): 2'-deoxy-2'-fluoro
  misc_feature (12)..(12): 2'-deoxy-2'-fluoro
  misc_feature (15)..(15): 2'-deoxy-2'-fluoro
  misc_feature (1)..(19): ribonucleotide modified as described
  misc_feature (20)..(20): Phosphorothioate 3'-Internucleotide Linkage
augaggcauagcagcaggatt

SEQ ID NO: 402 - RNA, 21 nt, Artificial Sequence
  Synthetic construct
  misc_feature (1)..(1): 5'-3 attached terminal deoxyabasic moiety
  misc_feature (1)..(3): 2'-deoxy-2'-fluoro
  misc_feature (5)..(8): 2'-deoxy-2'-fluoro
  misc_feature (10)..(10): 2'-deoxy-2'-fluoro
  misc_feature (12)..(13): 2'-deoxy-2'-fluoro
  misc_feature (15)..(16): 2'-deoxy-2'-fluoro
  misc_feature (18)..(21): 2'-deoxy-2'-fluoro
  misc_feature (21)..(21): 3'-3 attached terminal deoxyabasic moiety
ucuacuccguaucgucguccu

SEQ ID NO: 403 - DNA, 21 bp, Artificial Sequence
  Synthetic construct
  misc_feature (5)..(5): 2'-deoxy-2'-fluoro
  misc_feature (8)..(8): 2'-deoxy-2'-fluoro
  misc_feature (11)..(11): 2'-deoxy-2'-fluoro
  misc_feature (13)..(13): 2'-deoxy-2'-fluoro
  misc_feature (18)..(18): 2'-deoxy-2'-fluoro
  misc_feature (1)..(19): ribonucleotide modified as described
  misc_feature (20)..(20): Phosphorothioate 3'-Internucleotide Linkage
aggacgacgauacggaguatt

SEQ ID NO: 404 - RNA, 21 nt, Artificial Sequence
  Synthetic construct
  misc_feature (1)..(1): 5'-3 attached terminal deoxyabasic moiety
  misc_feature (1)..(1): 2'-deoxy-2'-fluoro
  misc_feature (3)..(3): 2'-deoxy-2'-fluoro
  misc_feature (5)..(6): 2'-deoxy-2'-fluoro
  misc_feature (8)..(10): 2'-deoxy-2'-fluoro
  misc_feature (12)..(14): 2'-deoxy-2'-fluoro
  misc_feature (16)..(21): 2'-deoxy-2'-fluoro
  misc_feature (21)..(21): 3'-3 attached terminal deoxyabasic moiety
uauguugcccguuuguccucu

SEQ ID NO: 405 - DNA, 21 bp, Artificial Sequence
  Synthetic construct
  misc_feature (5)..(5): 2'-deoxy-2'-fluoro
  misc_feature (9)..(9): 2'-deoxy-2'-fluoro
  misc_feature (13)..(13): 2'-deoxy-2'-fluoro
  misc_feature (16)..(16): 2'-deoxy-2'-fluoro
  misc_feature (18)..(18): 2'-deoxy-2'-fluoro
  misc_feature (1)..(19): ribonucleotide modified as described
  misc_feature (20)..(20): Phosphorothioate 3'-Internucleotide Linkage
aggacaaacgggcaacauatt

SEQ ID NO: 406 - RNA, 21 nt, Artificial Sequence
  Synthetic construct
  misc_feature (1)..(6): 2'-deoxy-2'-fluoro
  misc_feature (1)..(1): 5'-3 attached terminal deoxyabasic moiety
  misc_feature (8)..(10): 2'-deoxy-2'-fluoro
  misc_feature (12)..(14): 2'-deoxy-2'-fluoro
  misc_feature (16)..(17): 2'-deoxy-2'-fluoro
  misc_feature (19)..(19): 2'-deoxy-2'-fluoro
  misc_feature (21)..(21): 2'-deoxy-2'-fluoro
  misc_feature (21)..(21): 3'-3 attached terminal deoxyabasic moiety
ucuccuguuugcccguuguau

SEQ ID NO: 407 - DNA, 21 bp, Artificial Sequence
  Synthetic construct
  misc_feature (2)..(2): 2'-deoxy-2'-fluoro
  misc_feature (4)..(4): 2'-deoxy-2'-fluoro
  misc_feature (7)..(7): 2'-deoxy-2'-fluoro
  misc_feature (11)..(11): 2'-deoxy-2'-fluoro
  misc_feature (15)..(15): 2'-deoxy-2'-fluoro
  misc_feature (1)..(19): ribonucleotide modified as described
  misc_feature (20)..(20): Phosphorothioate 3'-Internucleotide Linkage
auacaacgggcaaacaggatt

SEQ ID NO: 408 - RNA, 21 nt, Artificial Sequence
  Synthetic construct
  misc_feature (1)..(1): 5'-3 attached terminal deoxyabasic moiety
  misc_feature (1)..(1): 2'-deoxy-2'-fluoro
  misc_feature (3)..(3): 2'-deoxy-2'-fluoro
  misc_feature (5)..(5): 2'-deoxy-2'-fluoro
  misc_feature (7)..(10): 2'-deoxy-2'-fluoro
  misc_feature (12)..(15): 2'-deoxy-2'-fluoro
  misc_feature (17)..(21): 2'-deoxy-2'-fluoro
  misc_feature (21)..(21): 3'-3 attached terminal deoxyabasic moiety
ugugcacuucgcuucaccucu

SEQ ID NO: 409 - DNA, 21 bp, Artificial Sequence
  Synthetic construct
  misc_feature (4)..(4): 2'-deoxy-2'-fluoro
  misc_feature (9)..(9): 2'-deoxy-2'-fluoro
  misc_feature (14)..(14): 2'-deoxy-2'-fluoro
  misc_feature (16)..(16): 2'-deoxy-2'-fluoro
  misc_feature (18)..(18): 2'-deoxy-2'-fluoro
  misc_feature (1)..(19): ribonucleotide modified as described
  misc_feature (20)..(20): Phosphorothioate 3'-Internucleotide Linkage
aggugaagcgaagugcacatt

SEQ ID NO: 410 - RNA, 21 nt, Artificial Sequence
  Synthetic construct
  misc_feature (1)..(1): 5'-3 attached terminal deoxyabasic moiety
  misc_feature (1)..(5): 2'-deoxy-2'-fluoro
  misc_feature (7)..(10): 2'-deoxy-2'-fluoro
  misc_feature (12)..(15): 2'-deoxy-2'-fluoro
  misc_feature (17)..(17): 2'-deoxy-2'-fluoro
  misc_feature (19)..(21): 2'-deoxy-2'-fluoro
  misc_feature (21)..(21): 3'-3 attached terminal deoxyabasic moiety
ucuccacuucgcuucacgugu

SEQ ID NO: 411 - DNA, 21 bp, Artificial Sequence
  Synthetic construct
  misc_feature (2)..(2): 2'-deoxy-2'-fluoro
  misc_feature (4)..(4): 2'-deoxy-2'-fluoro
  misc_feature (6)..(6): 2'-deoxy-2'-fluoro
  misc_feature (11)..(11): 2'-deoxy-2'-fluoro
  misc_feature (16)..(16): 2'-deoxy-2'-fluoro
  misc_feature (1)..(19): ribonucleotide modified as described
  misc_feature (20)..(20): Phosphorothioate 3'-Internucleotide Linkage
acacgugaagcgaaguggatt

SEQ ID NO: 412 - RNA, 21 nt, Artificial Sequence
  Synthetic construct
  misc_feature (1)..(1): 5'-3 attached terminal deoxyabasic moiety
  misc_feature (1)..(4): 2'-deoxy-2'-fluoro
  misc_feature (6)..(9): 2'-deoxy-2'-fluoro
  misc_feature (11)..(15): 2'-deoxy-2'-fluoro
  misc_feature (17)..(17): 2'-deoxy-2'-fluoro
  misc_feature (19)..(19): 2'-deoxy-2'-fluoro
  misc_feature (21)..(21): 2'-deoxy-2'-fluoro
  misc_feature (21)..(21): 3'-3 attached terminal deoxyabasic moiety
cuucgcuucaccucugcacgu

SEQ ID NO: 413 - DNA, 21 bp, Artificial Sequence
  Synthetic construct
  misc_feature (2)..(2): 2'-deoxy-2'-fluoro
  misc_feature (4)..(4): 2'-deoxy-2'-fluoro
  misc_feature (10)..(10): 2'-deoxy-2'-fluoro
  misc_feature (15)..(15): 2'-deoxy-2'-fluoro
  misc_feature (1)..(19): ribonucleotide modified as described
  misc_feature (20)..(20): Phosphorothioate 3'-Internucleotide Linkage
gugcagaggugaagcgaagtt

SEQ ID NO: 414 - RNA, 21 nt, Artificial Sequence
  Synthetic construct
  misc_feature (1)..(1): 5'-3 attached terminal deoxyabasic moiety
  misc_feature (1)..(1): 2'-deoxy-2'-fluoro
  misc_feature (3)..(3): 2'-deoxy-2'-fluoro
  misc_feature (5)..(5): 2'-deoxy-2'-fluoro
  misc_feature (7)..(11): 2'-deoxy-2'-fluoro
  misc_feature (13)..(16): 2'-deoxy-2'-fluoro
  misc_feature (18)..(21): 2'-deoxy-2'-fluoro
  misc_feature (21)..(21): 3'-3 attached terminal deoxyabasic moiety
ugcacgucuccacuucgcuuc

SEQ ID NO: 415 - DNA, 21 bp, Artificial Sequence
  Synthetic construct
  misc_feature (5)..(5): 2'-deoxy-2'-fluoro
  misc_feature (10)..(10): 2'-deoxy-2'-fluoro
  misc_feature (16)..(16): 2'-deoxy-2'-fluoro
  misc_feature (18)..(18): 2'-deoxy-2'-fluoro
  misc_feature (1)..(19): ribonucleotide modified as described
  misc_feature (20)..(20): Phosphorothioate 3'-Internucleotide Linkage
gaagcgaaguggagacgugtt

SEQ ID NO: 416 - RNA, 21 nt, Artificial Sequence
  Synthetic construct
  misc_feature (1)..(1): 5'-3 attached terminal deoxyabasic moiety
  misc_feature (4)..(5): 2'-deoxy-2'-fluoro
  misc_feature (7)..(7): 2'-deoxy-2'-fluoro
  misc_feature (11)..(11): 2'-deoxy-2'-fluoro
  misc_feature (13)..(13): 2'-deoxy-2'-fluoro
  misc_feature (17)..(18): 2'-deoxy-2'-fluoro
  misc_feature (21)..(21): 2'-deoxy-2'-fluoro
  misc_feature (21)..(21): 3'-3 attached terminal deoxyabasic moiety
aggcuguaggcauaaauuggu

SEQ ID NO: 417 - DNA, 21 bp, Artificial Sequence
  Synthetic construct
  misc_feature (1)..(1): 2'-deoxy-2'-fluoro
  misc_feature (4)..(6): 2'-deoxy-2'-fluoro
  misc_feature (8)..(8): 2'-deoxy-2'-fluoro
  misc_feature (10)..(12): 2'-deoxy-2'-fluoro
  misc_feature (14)..(14): 2'-deoxy-2'-fluoro
  misc_feature (17)..(19): 2'-deoxy-2'-fluoro
  misc_feature (1)..(19): ribonucleotide modified as described
  misc_feature (20)..(20): Phosphorothioate 3'-Internucleotide Linkage
caauuuaugccuacagccutt

SEQ ID NO: 418 - RNA, 21 nt, Artificial Sequence
  Synthetic construct
  misc_feature (1)..(1): 5'-3 attached terminal deoxyabasic moiety
  misc_feature (1)..(1): 2'-deoxy-2'-fluoro
  misc_feature (4)..(5): 2'-deoxy-2'-fluoro
  misc_feature (9)..(9): 2'-deoxy-2'-fluoro
  misc_feature (11)..(11): 2'-deoxy-2'-fluoro
  misc_feature (15)..(15): 2'-deoxy-2'-fluoro
  misc_feature (17)..(18): 2'-deoxy-2'-fluoro
  misc_feature (21)..(21): 3'-3 attached terminal deoxyabasic moiety
ugguuaaauacggaugucgga

SEQ ID NO: 419 - DNA, 21 bp, Artificial Sequence
  Synthetic construct
  misc_feature (1)..(3): 2'-deoxy-2'-fluoro
  misc_feature (6)..(6): 2'-deoxy-2'-fluoro
  misc_feature (8)..(10): 2'-deoxy-2'-fluoro
  misc_feature (12)..(12): 2'-deoxy-2'-fluoro
  misc_feature (14)..(16): 2'-deoxy-2'-fluoro
  misc_feature (19)..(19): 2'-deoxy-2'-fluoro
  misc_feature (1)..(19): ribonucleotide modified as described
  misc_feature (20)..(20): Phosphorothioate 3'-Internucleotide Linkage
uccgacauccguauuuaactt

SEQ ID NO: 420 - DNA, 21 bp, Artificial Sequence
  Synthetic construct
  misc_feature (1)..(1): 2'-deoxy-2'-fluoro
  misc_feature (1)..(1): 5'-3 attached terminal deoxyabasic moiety
  misc_feature (2)..(2): 2'-deoxy
  misc_feature (3)..(3): 2'-deoxy-2'-fluoro
  misc_feature (4)..(4): 2'-deoxy
  misc_feature (5)..(5): 2'-deoxy-2'-fluoro
  misc_feature (6)..(6): 2'-deoxy
  misc_feature (7)..(10): 2'-deoxy-2'-fluoro
  misc_feature (11)..(11): 2'-deoxy
  misc_feature (12)..(15): 2'-deoxy-2'-fluoro
  misc_feature (16)..(16): 2'-deoxy
  misc_feature (17)..(19): 2'-deoxy-2'-fluoro
  misc_feature (1)..(19): ribonucleotide modified as described
  misc_feature (21)..(21): 3'-3 attached terminal deoxyabasic moiety
ugugcacuucgcuucaccutt

SEQ ID NO: 421 - DNA, 21 bp, Artificial Sequence
  Synthetic construct
  misc_feature (1)..(3): 2'-O-methyl
  misc_feature (4)..(4): 2'-deoxy-2'-fluoro
  misc_feature (5)..(8): 2'-O-methyl
  misc_feature (9)..(9): 2'-deoxy-2'-fluoro
  misc_feature (10)..(13): 2'-O-methyl
  misc_feature (14)..(14): 2'-deoxy-2'-fluoro
  misc_feature (15)..(15): 2'-O-methyl
  misc_feature (16)..(16): 2'-deoxy-2'-fluoro
  misc_feature (17)..(17): 2'-O-methyl
  misc_feature (18)..(18): 2'-deoxy-2'-fluoro
  misc_feature (19)..(19): 2'-O-methyl
  misc_feature (1)..(19): ribonucleotide modified as described
  misc_feature (20)..(20): Phosphorothioate 3'-Internucleotide Linkage
aggugaagcgaagugcacatt

SEQ ID NO: 422 - DNA, 21 bp, Artificial Sequence
  Synthetic construct
  misc_feature (1)..(5): 2'-deoxy-2'-fluoro
  misc_feature (1)..(1): 5'-3 attached terminal deoxyabasic moiety
  misc_feature (6)..(6): 2'-deoxy
  misc_feature (7)..(10): 2'-deoxy-2'-fluoro
  misc_feature (11)..(11): 2'-deoxy
  misc_feature (12)..(15): 2'-deoxy-2'-fluoro
  misc_feature (16)..(16): 2'-deoxy
  misc_feature (17)..(17): 2'-deoxy-2'-fluoro
  misc_feature (18)..(18): 2'-deoxy
  misc_feature (19)..(19): 2'-deoxy-2'-fluoro
  misc_feature (1)..(19): ribonucleotide modified as described
  misc_feature (21)..(21): 3'-3 attached terminal deoxyabasic moiety
ucuccacuucgcuucacgutt

SEQ ID NO: 423 - DNA, 21 bp, Artificial Sequence
  Synthetic construct
  misc_feature (1)..(1): 2'-O-methyl
  misc_feature (2)..(2): 2'-deoxy-2'-fluoro
  misc_feature (3)..(3): 2'-O-methyl
  misc_feature (4)..(4): 2'-deoxy-2'-fluoro
  misc_feature (5)..(5): 2'-O-methyl
  misc_feature (6)..(6): 2'-deoxy-2'-fluoro
  misc_feature (7)..(7): 2'-O-methyl
  misc_feature (8)..(8): 2'-deoxy-2'-fluoro
  misc_feature (9)..(12): 2'-O-methyl
  misc_feature (13)..(13): 2'-deoxy-2'-fluoro
  misc_feature (14)..(17): 2'-O-methyl
  misc_feature (18)..(18): 2'-deoxy-2'-fluoro
  misc_feature (19)..(19): 2'-O-methyl
  misc_feature (1)..(19): ribonucleotide modified as described
  misc_feature (20)..(20): Phosphorothioate 3'-Internucleotide Linkage
gcacacgugaagcgaagugtt

SEQ ID NO: 424 - DNA, 21 bp, Artificial Sequence
  Synthetic construct
  misc_feature (1)..(3): 2'-deoxy
  misc_feature (4)..(4): 2'-deoxy-2'-fluoro
  misc_feature (5)..(8): 2'-deoxy
  misc_feature (9)..(9): 2'-deoxy-2'-fluoro
  misc_feature (10)..(13): 2'-deoxy
  misc_feature (14)..(14): 2'-deoxy-2'-fluoro
  misc_feature (15)..(15): 2'-deoxy
  misc_feature (16)..(16): 2'-deoxy-2'-fluoro
  misc_feature (17)..(17): 2'-deoxy
  misc_feature (18)..(18): 2'-deoxy-2'-fluoro
  misc_feature (19)..(19): 2'-deoxy
  misc_feature (1)..(19): ribonucleotide modified as described
  misc_feature (20)..(20): Phosphorothioate 3'-Internucleotide Linkage
aggugaagcgaagugcacatt

SEQ ID NO: 425 - DNA, 21 bp, Artificial Sequence
  Synthetic construct
  misc_feature (2)..(2): 2'-deoxy-2'-fluoro
  misc_feature (4)..(4): 2'-deoxy-2'-fluoro
  misc_feature (6)..(6): 2'-deoxy-2'-fluoro
  misc_feature (8)..(8): 2'-deoxy-2'-fluoro
  misc_feature (13)..(13): 2'-deoxy-2'-fluoro
  misc_feature (18)..(18): 2'-deoxy-2'-fluoro
  misc_feature (1)..(19): ribonucleotide modified as described
  misc_feature (20)..(20): Phosphorothioate 3'-Internucleotide Linkage
gcacacgugaagcgaagugtt

SEQ ID NO: 426 - RNA, 21 nt, Artificial Sequence
  Synthetic construct
ugugcacuucgcuucaccucu

SEQ ID NO: 427 - RNA, 21 nt, Artificial Sequence
  Synthetic construct
aggugaagcgaagugcacacg

SEQ ID NO: 428 - DNA, 21 bp, Artificial Sequence
  Synthetic construct
  misc_feature (1)..(1): 2'-O-methyl
  misc_feature (1)..(1): 5'-3 attached terminal deoxyabasic moiety
  misc_feature (2)..(2): 2'-deoxy
  misc_feature (3)..(3): 2'-O-methyl
  misc_feature (4)..(4): 2'-deoxy
  misc_feature (5)..(5): 2'-O-methyl
  misc_feature (6)..(6): 2'-deoxy
  misc_feature (7)..(10): 2'-O-methyl
  misc_feature (11)..(11): 2'-deoxy
  misc_feature (12)..(15): 2'-O-methyl
  misc_feature (16)..(16): 2'-deoxy
  misc_feature (17)..(19): 2'-O-methyl
  misc_feature (1)..(19): ribonucleotide modified as described
  misc_feature (21)..(21): 3'-3 attached terminal deoxyabasic moiety
ugugcacuucgcuucaccutt

SEQ ID NO: 429 - DNA, 21 bp, Artificial Sequence
  Synthetic construct
  misc_feature (1)..(19): ribonucleotide modified as described
  misc_feature (20)..(20): Phosphorothioate 3'-Internucleotide Linkage
aggugaagcgaagugcacatt

SEQ ID NO: 430 - DNA, 21 bp, Artificial Sequence
  Synthetic construct
  misc_feature (1)..(3): 2'-O-methyl
  misc_feature (1)..(1): 5'-3 attached terminal deoxyabasic moiety
  misc_feature (5)..(5): 2'-O-methyl
  misc_feature (8)..(8): 2'-O-methyl
  misc_feature (10)..(11): 2'-O-methyl
  misc_feature (13)..(15): 2'-O-methyl
  misc_feature (18)..(18): 2'-O-methyl
  misc_feature (1)..(19): ribonucleotide modified as described
  misc_feature (21)..(21): 3'-3 attached terminal deoxyabasic moiety
cuugugguacugccugauatt

SEQ ID NO: 431 - DNA, 21 bp, Artificial Sequence
  Synthetic construct
  misc_feature (1)..(1): 2'-O-methyl
  misc_feature (3)..(4): 2'-O-methyl
  misc_feature (8)..(8): 2'-O-methyl
  misc_feature (11)..(11): 2'-O-methyl
  misc_feature (13)..(14): 2'-O-methyl
  misc_feature (16)..(16): 2'-O-methyl
  misc_feature (1)..(19): ribonucleotide modified as described
  misc_feature (20)..(20): Phosphorothioate 3'-Internucleotide Linkage
uaucaggcaguaccacaagtt

SEQ ID NO: 432 - DNA, 21 bp, Artificial Sequence
  Synthetic construct
  misc_feature (1)..(1): 5'-3 attached terminal deoxyabasic moiety
  misc_feature (2)..(2): 2'-O-methyl
  misc_feature (5)..(7): 2'-O-methyl
  misc_feature (9)..(10): 2'-O-methyl
  misc_feature (12)..(12): 2'-O-methyl
  misc_feature (15)..(15): 2'-O-methyl
  misc_feature (17)..(19): 2'-O-methyl
  misc_feature (1)..(19): ribonucleotide modified as described
  misc_feature (21)..(21): 3'-3 attached terminal deoxyabasic moiety
auaguccgucaugguguuctt

SEQ ID NO: 433 - DNA, 21 bp, Artificial Sequence
  Synthetic construct
  misc_feature (4)..(4): 2'-O-methyl
  misc_feature (6)..(7): 2'-O-methyl
  misc_feature (9)..(9): 2'-O-methyl
  misc_feature (12)..(12): 2'-O-methyl
  misc_feature (16)..(17): 2'-O-methyl
  misc_feature (19)..(19): 2'-O-methyl
  misc_feature (1)..(19): ribonucleotide modified as described
  misc_feature (20)..(20): Phosphorothioate 3'-Internucleotide Linkage
gaacaccaugacggacuautt

SEQ ID NO: 434 - DNA, 21 bp, Artificial Sequence
  Synthetic construct
  misc_feature (1)..(2): 2'-O-methyl
  misc_feature (1)..(1): 5'-3 attached terminal deoxyabasic moiety
  misc_feature (4)..(6): 2'-O-methyl
  misc_feature (9)..(9): 2'-O-methyl
  misc_feature (14)..(14): 2'-O-methyl
  misc_feature (16)..(18): 2'-O-methyl
  misc_feature (1)..(19): ribonucleotide modified as described
  misc_feature (21)..(21): 3'-3 attached terminal deoxyabasic moiety
cugccugauagggugcuugtt

SEQ ID NO: 435 - DNA, 21 bp, Artificial Sequence
  Synthetic construct
  misc_feature (1)..(1): 2'-O-methyl
  misc_feature (5)..(5): 2'-O-methyl
  misc_feature (7)..(10): 2'-O-methyl
  misc_feature (12)..(13): 2'-O-methyl
  misc_feature (17)..(17): 2'-O-methyl
  misc_feature (1)..(19): ribonucleotide modified as described
  misc_feature (20)..(20): Phosphorothioate 3'-Internucleotide Linkage
caagcacccuaucaggcagtt

SEQ ID NO: 436 - DNA, 21 bp, Artificial Sequence
  Synthetic construct
  misc_feature (1)..(1): 5'-3 attached terminal deoxyabasic moiety
  misc_feature (2)..(4): 2'-O-methyl
  misc_feature (6)..(6): 2'-O-methyl
  misc_feature (11)..(11): 2'-O-methyl
  misc_feature (14)..(16): 2'-O-methyl
  misc_feature (18)..(19): 2'-O-methyl
  misc_feature (1)..(19): ribonucleotide modified as described
  misc_feature (21)..(21): 3'-3 attached terminal deoxyabasic moiety
guucgugggauaguccguctt

SEQ ID NO: 437 - DNA, 21 bp, Artificial Sequence
  Synthetic construct
  misc_feature (3)..(3): 2'-O-methyl
  misc_feature (7)..(8): 2'-O-methyl
  misc_feature (10)..(13): 2'-O-methyl
  misc_feature (15)..(15): 2'-O-methyl
  misc_feature (19)..(19): 2'-O-methyl
  misc_feature (1)..(19): ribonucleotide modified as described
  misc_feature (20)..(20): Phosphorothioate 3'-Internucleotide Linkage
gacggacuaucccacgaactt

SEQ ID NO: 438 - DNA, 21 bp, Artificial Sequence
  Synthetic construct
  misc_feature (1)..(3): 2'-O-methyl
  misc_feature (1)..(1): 5'-3 attached terminal deoxyabasic moiety
  misc_feature (6)..(6): 2'-O-methyl
  misc_feature (11)..(11): 2'-O-methyl
  misc_feature (13)..(15): 2'-O-methyl
  misc_feature (17)..(17): 2'-O-methyl
  misc_feature (1)..(19): ribonucleotide modified as described
  misc_feature (21)..(21): 3'-3 attached terminal deoxyabasic moiety
ccugauagggugcuugcgatt

SEQ ID NO: 439 - DNA, 21 bp, Artificial Sequence
  Synthetic construct
  misc_feature (1)..(2): 2'-O-methyl
  misc_feature (4)..(4): 2'-O-methyl
  misc_feature (8)..(8): 2'-O-methyl
  misc_feature (10)..(13): 2'-O-methyl
  misc_feature (15)..(16): 2'-O-methyl
  misc_feature (1)..(19): ribonucleotide modified as described
  misc_feature (20)..(20): Phosphorothioate 3'-Internucleotide Linkage
ucgcaagcacccuaucaggtt

SEQ ID NO: 440 - DNA, 21 bp, Artificial Sequence
  Synthetic construct
  misc_feature (1)..(1): 5'-3 attached terminal deoxyabasic moiety
  misc_feature (3)..(3): 2'-O-methyl
  misc_feature (5)..(7): 2'-O-methyl
  misc_feature (9)..(9): 2'-O-methyl
  misc_feature (14)..(14): 2'-O-methyl
  misc_feature (17)..(19): 2'-O-methyl
  misc_feature (1)..(19): ribonucleotide modified as described
  misc_feature (21)..(21): 3'-3 attached terminal deoxyabasic moiety
agcguucgugggauagucctt

SEQ ID NO: 441 - DNA, 21 bp, Artificial Sequence
  Synthetic construct
  misc_feature (4)..(5): 2'-O-methyl
  misc_feature (7)..(10): 2'-O-methyl
  misc_feature (12)..(12): 2'-O-methyl
  misc_feature (16)..(16): 2'-O-methyl
  misc_feature (18)..(19): 2'-O-methyl
  misc_feature (1)..(19): ribonucleotide modified as described
  misc_feature (20)..(20): Phosphorothioate 3'-Internucleotide Linkage
ggacuaucccacgaacgcutt

SEQ ID NO: 442 - DNA, 21 bp, Artificial Sequence
  Synthetic construct
  misc_feature (1)..(4): 2'-O-methyl
  misc_feature (1)..(1): 5'-3 attached terminal deoxyabasic moiety
  misc_feature (11)..(14): 2'-O-methyl
  misc_feature (16)..(16): 2'-O-methyl
  misc_feature (1)..(19): ribonucleotide modified as described
  misc_feature (21)..(21): 3'-3 attached terminal deoxyabasic moiety
ccccgggaggucucguagatt

SEQ ID NO: 443 - DNA, 21 bp, Artificial Sequence
  Synthetic construct
  misc_feature (1)..(3): 2'-O-methyl
  misc_feature (5)..(5): 2'-O-methyl
  misc_feature (10)..(15): 2'-O-methyl
  misc_feature (1)..(19): ribonucleotide modified as described
  misc_feature (20)..(20): Phosphorothioate 3'-Internucleotide Linkage
ucuacgagaccucccggggtt

SEQ ID NO: 444 - DNA, 21 bp, Artificial Sequence
  Synthetic construct
  misc_feature (1)..(1): 5'-3 attached terminal deoxyabasic moiety
  misc_feature (4)..(4): 2'-O-methyl
  misc_feature (6)..(9): 2'-O-methyl
  misc_feature (16)..(19): 2'-O-methyl
  misc_feature (1)..(19): ribonucleotide modified as described
  misc_feature (21)..(21): 3'-3 attached terminal deoxyabasic moiety
agaugcucuggagggcccctt

SEQ ID NO: 445 - DNA, 21 bp, Artificial Sequence
  Synthetic construct
  misc_feature (5)..(10): 2'-O-methyl
  misc_feature (15)..(15): 2'-O-methyl
  misc_feature (17)..(19): 2'-O-methyl
  misc_feature (1)..(19): ribonucleotide modified as described
  misc_feature (20)..(20): Phosphorothioate 3'-Internucleotide Linkage
ggggcccuccagagcaucutt

SEQ ID NO: 446 - DNA, 21 bp, Artificial Sequence
  Synthetic construct
  misc_feature (1)..(3): 2'-O-methyl
  misc_feature (1)..(1): 5'-3 attached terminal deoxyabasic moiety
  misc_feature (10)..(13): 2'-O-methyl
  misc_feature (15)..(15): 2'-O-methyl
  misc_feature (19)..(19): 2'-O-methyl
  misc_feature (1)..(19): ribonucleotide modified as described
  misc_feature (21)..(21): 3'-3 attached terminal deoxyabasic moiety
cccgggaggucucguagactt

SEQ ID NO: 447 - DNA, 21 bp, Artificial Sequence
  Synthetic construct
  misc_feature (2)..(4): 2'-O-methyl
  misc_feature (6)..(6): 2'-O-methyl
  misc_feature (11)..(16): 2'-O-methyl
  misc_feature (1)..(19): ribonucleotide modified as described
  misc_feature (20)..(20): Phosphorothioate 3'-Internucleotide Linkage
gucuacgagaccucccgggtt

SEQ ID NO: 448 - DNA, 21 bp, Artificial Sequence
  Synthetic construct
  misc_feature (1)..(1): 2'-O-methyl
  misc_feature (1)..(1): 5'-3 attached terminal deoxyabasic moiety
  misc_feature (5)..(5): 2'-O-methyl
  misc_feature (7)..(10): 2'-O-methyl
  misc_feature (17)..(19): 2'-O-methyl
  misc_feature (1)..(19): ribonucleotide modified as described
  misc_feature (21)..(21): 3'-3 attached terminal deoxyabasic moiety
cagaugcucuggagggccctt

SEQ ID NO: 449 - DNA, 21 bp, Artificial Sequence
  Synthetic construct
  misc_feature (4)..(9): 2'-O-methyl
  misc_feature (14)..(14): 2'-O-methyl
  misc_feature (16)..(18): 2'-O-methyl
  misc_feature (1)..(19): ribonucleotide modified as described
  misc_feature (20)..(20): Phosphorothioate 3'-Internucleotide Linkage
gggcccuccagagcaucugtt

SEQ ID NO: 450 - DNA, 21 bp, Artificial Sequence
  Synthetic construct
  misc_feature (1)..(2): 2'-O-methyl
  misc_feature (1)..(1): 5'-3 attached terminal deoxyabasic moiety
  misc_feature (9)..(12): 2'-O-methyl
  misc_feature (14)..(14): 2'-O-methyl
  misc_feature (18)..(19): 2'-O-methyl
  misc_feature (1)..(19): ribonucleotide modified as described
  misc_feature (21)..(21): 3'-3 attached terminal deoxyabasic moiety
ccgggaggucucguagacctt

SEQ ID NO: 451 - DNA, 21 bp, Artificial Sequence
  Synthetic construct
  misc_feature (3)..(5): 2'-O-methyl
  misc_feature (7)..(7): 2'-O-methyl
  misc_feature (12)..(17): 2'-O-methyl
  misc_feature (1)..(19): ribonucleotide modified as described
  misc_feature (20)..(20): Phosphorothioate 3'-Internucleotide Linkage
ggucuacgagaccucccggtt

SEQ ID NO: 452 - DNA, 21 bp, Artificial Sequence
  Synthetic construct
  misc_feature (1)..(2): 2'-O-methyl
  misc_feature (1)..(1): 5'-3 attached terminal deoxyabasic moiety
  misc_feature (6)..(6): 2'-O-methyl
  misc_feature (8)..(11): 2'-O-methyl
  misc_feature (18)..(19): 2'-O-methyl
  misc_feature (1)..(19): ribonucleotide modified as described
  misc_feature (21)..(21): 3'-3 attached terminal deoxyabasic moiety
ccagaugcucuggagggcctt

SEQ ID NO: 453 - DNA, 21 bp, Artificial Sequence
  Synthetic construct
  misc_feature (3)..(8): 2'-O-methyl
  misc_feature (13)..(13): 2'-O-methyl
  misc_feature (15)..(17): 2'-O-methyl
  misc_feature (1)..(19): ribonucleotide modified as described
  misc_feature (20)..(20): Phosphorothioate 3'-Internucleotide Linkage
ggcccuccagagcaucuggtt

SEQ ID NO: 454 - DNA, 21 bp, Artificial Sequence
  Synthetic construct
  misc_feature (1)..(1): 2'-O-methyl
  misc_feature (1)..(1): 5'-3 attached terminal deoxyabasic moiety
  misc_feature (8)..(11): 2'-O-methyl
  misc_feature (13)..(13): 2'-O-methyl
  misc_feature (17)..(18): 2'-O-methyl
  misc_feature (1)..(19): ribonucleotide modified as described
  misc_feature (21)..(21): 3'-3 attached terminal deoxyabasic moiety
cgggaggucucguagaccgtt

SEQ ID NO: 455 - DNA, 21 bp, Artificial Sequence
  Synthetic construct
  misc_feature (1)..(1): 2'-O-methyl
  misc_feature (4)..(6): 2'-O-methyl
  misc_feature (8)..(8): 2'-O-methyl
  misc_feature (13)..(18): 2'-O-methyl
  misc_feature (1)..(19): ribonucleotide modified as described
  misc_feature (20)..(20): Phosphorothioate 3'-Internucleotide Linkage
cggucuacgagaccucccgtt

SEQ ID NO: 456 - DNA, 21 bp, Artificial Sequence
  Synthetic construct
  misc_feature (1)..(1): 5'-3 attached terminal deoxyabasic moiety
  misc_feature (2)..(3): 2'-O-methyl
  misc_feature (7)..(7): 2'-O-methyl
  misc_feature (9)..(12): 2'-O-methyl
  misc_feature (19)..(19): 2'-O-methyl
  misc_feature (1)..(19): ribonucleotide modified as described
  misc_feature (21)..(21): 3'-3 attached terminal deoxyabasic moiety
gccagaugcucuggagggctt

SEQ ID NO: 457 - DNA, 21 bp, Artificial Sequence
  Synthetic construct
  misc_feature (2)..(7): 2'-O-methyl
  misc_feature (12)..(12): 2'-O-methyl
  misc_feature (14)..(16): 2'-O-methyl
  misc_feature (19)..(19): 2'-O-methyl
  misc_feature (1)..(19): ribonucleotide modified as described
  misc_feature (20)..(20): Phosphorothioate 3'-Internucleotide Linkage
gcccuccagagcaucuggctt

SEQ ID NO: 458 - DNA, 21 bp, Artificial Sequence
  Synthetic construct
  misc_feature (1)..(1): 5'-3 attached terminal deoxyabasic moiety
  misc_feature (7)..(10): 2'-O-methyl
  misc_feature (12)..(12): 2'-O-methyl
  misc_feature (16)..(17): 2'-O-methyl
  misc_feature (19)..(19): 2'-O-methyl
  misc_feature (1)..(19): ribonucleotide modified as described
  misc_feature (21)..(21): 3'-3 attached terminal deoxyabasic moiety
gggaggucucguagaccgutt

SEQ ID NO: 459 - DNA, 21 bp, Artificial Sequence
  Synthetic construct
  misc_feature (2)..(2): 2'-O-methyl
  misc_feature (5)..(7): 2'-O-methyl
  misc_feature (9)..(9): 2'-O-methyl
  misc_feature (14)..(19): 2'-O-methyl
  misc_feature (1)..(19): ribonucleotide modified as described
  misc_feature (20)..(20): Phosphorothioate 3'-Internucleotide Linkage
acggucuacgagaccuccctt

SEQ ID NO: 460 - DNA, 21 bp, Artificial Sequence
  Synthetic construct
  misc_feature (1)..(1): 2'-O-methyl
  misc_feature (1)..(1): 5'-3 attached terminal deoxyabasic moiety
  misc_feature (3)..(4): 2'-O-methyl
  misc_feature (8)..(8): 2'-O-methyl
  misc_feature (10)..(13): 2'-O-methyl
  misc_feature (1)..(19): ribonucleotide modified as described
  misc_feature (21)..(21): 3'-3 attached terminal deoxyabasic moiety
ugccagaugcucuggagggtt

SEQ ID NO: 461 - DNA, 21 bp, Artificial Sequence
  Synthetic construct
  misc_feature (1)..(6): 2'-O-methyl
  misc_feature (11)..(11): 2'-O-methyl
  misc_feature (13)..(15): 2'-O-methyl
  misc_feature (18)..(18): 2'-O-methyl
  misc_feature (1)..(19): ribonucleotide modified as described
  misc_feature (20)..(20): Phosphorothioate 3'-Internucleotide Linkage
cccuccagagcaucuggcatt

SEQ ID NO: 462 - DNA, 34 bp, Artificial Sequence
  Synthetic construct
  misc_feature (1)..(32): ribonucleotide modified as described
ucucguagaccuuggucuacgagaccucccggtt

SEQ ID NO: 463 - DNA, 32 bp, Artificial Sequence
  Synthetic construct
  misc_feature (1)..(30): ribonucleotide modified as described
ucguagaccuuggucuacgagaccucccggtt

SEQ ID NO: 464 - DNA, 30 bp, Artificial Sequence
  Synthetic construct
  misc_feature (1)..(28): ribonucleotide modified as described
guagaccuuggucuacgagaccucccggtt

SEQ ID NO: 465 - DNA, 28 bp, Artificial Sequence
  Synthetic construct
  misc_feature (1)..(26): ribonucleotide modified as described
agaccuuggucuacgagaccucccggtt

SEQ ID NO: 466 - RNA, 32 nt, Artificial Sequence
  Synthetic construct
ggucuacgagaccucccgguuccgggaggucu

SEQ ID NO: 467 - RNA, 30 nt, Artificial Sequence
  Synthetic construct
ggucuacgagaccucccgguuccgggaggu

SEQ ID NO: 468 - RNA, 28 nt, Artificial Sequence
  Synthetic construct
ggucuacgagaccucccgguuccgggag

SEQ ID NO: 469 - RNA, 26 nt, Artificial Sequence
  Synthetic construct
ggucuacgagaccucccgguuccggg

SEQ ID NO: 470 - DNA, 35 bp, Artificial Sequence
  Synthetic construct
  misc_feature (1)..(33): ribonucleotide modified as described
cucguagaccgaaaggucuacgagaccucccggtt

SEQ ID NO: 471 - DNA, 33 bp, Artificial Sequence
  Synthetic construct
  misc_feature (1)..(31): ribonucleotide modified as described
cguagaccgaaaggucuacgagaccucccggtt

SEQ ID NO: 472 - DNA, 31 bp, Artificial Sequence
  Synthetic construct
  misc_feature (1)..(29): ribonucleotide modified as described
uagaccgaaaggucuacgagaccucccggtt

SEQ ID NO: 473 - DNA, 29 bp, Artificial Sequence
  Synthetic construct
  misc_feature (1)..(27): ribonucleotide modified as described
gaccgaaaggucuacgagaccucccggtt

SEQ ID NO: 474 - RNA, 35 nt, Artificial Sequence
  Synthetic construct
ggucuacgagaccucccgguugaaaccgggagguc

SEQ ID NO: 475 - RNA, 33 nt, Artificial Sequence
  Synthetic construct
ggucuacgagaccucccgguugaaaccgggagg

SEQ ID NO: 476 - RNA, 31 nt, Artificial Sequence
  Synthetic construct
ggucuacgagaccucccgguugaaaccggga

SEQ ID NO: 477 - RNA, 29 nt, Artificial Sequence
  Synthetic construct
ggucuacgagaccucccgguugaaaccgg

SEQ ID NO: 478 - DNA, 40 bp, Artificial Sequence
  Synthetic construct
  misc_feature (1)..(28): ribonucleotide modified as described
cguagaccuuuuuguguagggucuacgagaccucccggtt

SEQ ID NO: 479 - DNA, 38 bp, Artificial Sequence
  Synthetic construct
  misc_feature (1)..(36): ribonucleotide modified as described
uagaccuuuuuguguagggucuacgagaccucccggtt

SEQ ID NO: 480 - DNA, 36 bp, Artificial Sequence
  Synthetic construct
  misc_feature (1)..(34): ribonucleotide modified as described
gaccuuuuuguguagggucuacgagaccucccggtt

SEQ ID NO: 481 - DNA, 34 bp, Artificial Sequence
  Synthetic construct
  misc_feature (1)..(32): ribonucleotide modified as described
ccuuuuuguguagggucuacgagaccucccggtt

SEQ ID NO: 482 - RNA, 40 nt, Artificial Sequence
  Synthetic construct
ggucuacgagaccucccgguuuuuguguagccgggagguc

SEQ ID NO: 483 - RNA, 38 nt, Artificial Sequence
  Synthetic construct
ggucuacgagaccucccgguuuuuguguagccgggagg

SEQ ID NO: 484 - RNA, 36 nt, Artificial Sequence
  Synthetic construct
ggucuacgagaccucccgguuuuuguguagccggga

SEQ ID NO: 485 - RNA, 34 nt, Artificial Sequence
  Synthetic construct
ggucuacgagaccucccgguuuuuguguagccgg

SEQ ID NO: 486 - DNA, 34 bp, Artificial Sequence; identical to SEQ ID NO: 462
  Synthetic construct
  misc_feature (1)..(4): 2'-O-methyl
  misc_feature (6)..(6): 2'-O-methyl
  misc_feature (10)..(13): 2'-O-methyl
  misc_feature (16)..(18): 2'-O-methyl
  misc_feature (20)..(20): 2'-O-methyl
  misc_feature (25)..(30): 2'-O-methyl
  misc_feature (1)..(32): ribonucleotide modified as described
  misc_feature (33)..(33): Phosphorothioate 3'-Internucleotide Linkage

SEQ ID NO: 487 - DNA, 32 bp, Artificial Sequence; identical to SEQ ID NO: 463
  Synthetic construct
  misc_feature (1)..(2): 2'-O-methyl
  misc_feature (4)..(4): 2'-O-methyl
  misc_feature (8)..(11): 2'-O-methyl
  misc_feature (14)..(16): 2'-O-methyl
  misc_feature (18)..(18): 2'-O-methyl
  misc_feature (23)..(28): 2'-O-methyl
  misc_feature (1)..(30): ribonucleotide modified as described
  misc_feature (31)..(31): Phosphorothioate 3'-Internucleotide Linkage

SEQ ID NO: 488 - DNA, 30 bp, Artificial Sequence; identical to SEQ ID NO: 464
  Synthetic construct
  misc_feature (2)..(2): 2'-O-methyl
  misc_feature (6)..(9): 2'-O-methyl
  misc_feature (12)..(14): 2'-O-methyl
  misc_feature (16)..(16): 2'-O-methyl
  misc_feature (21)..(26): 2'-O-methyl
  misc_feature (1)..(28): ribonucleotide modified as described
  misc_feature (29)..(29): Phosphorothioate 3'-Internucleotide Linkage

SEQ ID NO: 489 - DNA, 28 bp, Artificial Sequence
  Synthetic construct
  misc_feature (4)..(7): 2'-O-methyl
  misc_feature (10)..(12): 2'-O-methyl
  misc_feature (14)..(14): 2'-O-methyl
  misc_feature (19)..(24): 2'-O-methyl
  misc_feature (1)..(26): ribonucleotide modified as described
  misc_feature (27)..(27): Phosphorothioate 3'-Internucleotide Linkage
agaccuuggucuacgagaccucccggtt

SEQ ID NO: 490 - RNA, 32 nt, Artificial Sequence; identical to SEQ ID NO: 466
  Synthetic construct
  misc_feature (3)..(5): 2'-O-methyl
  misc_feature (7)..(7): 2'-O-methyl
  misc_feature (12)..(17): 2'-O-methyl
  misc_feature (20)..(23): 2'-O-methyl
  misc_feature (30)..(32): 2'-O-methyl

SEQ ID NO: 491 - RNA, 30 nt, Artificial Sequence; identical to SEQ ID NO: 467
  Synthetic construct
  misc_feature (3)..(5): 2'-O-methyl
  misc_feature (7)..(7): 2'-O-methyl
  misc_feature (12)..(17): 2'-O-methyl
  misc_feature (20)..(23): 2'-O-methyl
  misc_feature (30)..(30): 2'-O-methyl

SEQ ID NO: 492 - RNA, 28 nt, Artificial Sequence
  Synthetic construct
  misc_feature (3)..(5): 2'-O-methyl
  misc_feature (7)..(7): 2'-O-methyl
  misc_feature (12)..(17): 2'-O-methyl
  misc_feature (20)..(23): 2'-O-methyl
ggucuacgagaccucccgguuccgggag

SEQ ID NO: 493 - RNA, 26 nt, Artificial Sequence
  Synthetic construct
  misc_feature (3)..(5): 2'-O-methyl
  misc_feature (7)..(7): 2'-O-methyl
  misc_feature (12)..(17): 2'-O-methyl
  misc_feature (20)..(23): 2'-O-methyl
ggucuacgagaccucccgguuccggg

SEQ ID NO: 494 - DNA, 35 bp, Artificial Sequence; identical to SEQ ID NO: 470
  Synthetic construct
  misc_feature (1)..(3): 2'-O-methyl
  misc_feature (5)..(5): 2'-O-methyl
  misc_feature (9)..(10): 2'-O-methyl
  misc_feature (17)..(19): 2'-O-methyl
  misc_feature (21)..(21): 2'-O-methyl
  misc_feature (26)..(31): 2'-O-methyl
  misc_feature (1)..(33): ribonucleotide modified as described
  misc_feature (34)..(34): Phosphorothioate 3'-Internucleotide Linkage

SEQ ID NO: 495 - DNA, 33 bp, Artificial Sequence; identical to SEQ ID NO: 471
  Synthetic construct
  misc_feature (1)..(1): 2'-O-methyl
  misc_feature (3)..(3): 2'-O-methyl
  misc_feature (7)..(8): 2'-O-methyl
  misc_feature (15)..(17): 2'-O-methyl
  misc_feature (19)..(19): 2'-O-methyl
  misc_feature (24)..(29): 2'-O-methyl
  misc_feature (1)..(31): ribonucleotide modified as described
  misc_feature (32)..(32): Phosphorothioate 3'-Internucleotide Linkage

SEQ ID NO: 496 - DNA, 31 bp, Artificial Sequence; identical to SEQ ID NO: 472
  Synthetic construct
  misc_feature (1)..(1): 2'-O-methyl
  misc_feature (5)..(6): 2'-O-methyl
  misc_feature (13)..(15): 2'-O-methyl
  misc_feature (17)..(17): 2'-O-methyl
  misc_feature (22)..(27): 2'-O-methyl
  misc_feature (1)..(29): ribonucleotide modified as described
  misc_feature (30)..(30): Phosphorothioate 3'-Internucleotide Linkage

SEQ ID NO: 497 - DNA, 29 bp, Artificial Sequence
  Synthetic construct
  misc_feature (3)..(4): 2'-O-methyl
  misc_feature (11)..(13): 2'-O-methyl
  misc_feature (15)..(15): 2'-O-methyl
  misc_feature (20)..(25): 2'-O-methyl
  misc_feature (1)..(27): ribonucleotide modified as described
  misc_feature (28)..(28): Phosphorothioate 3'-Internucleotide Linkage
gaccgaaaggucuacgagaccucccggtt

SEQ ID NO: 498 - RNA, 35 nt, Artificial Sequence; identical to SEQ ID NO: 474
  Synthetic construct
  misc_feature (3)..(5): 2'-O-methyl
  misc_feature (7)..(7): 2'-O-methyl
  misc_feature (12)..(17): 2'-O-methyl
  misc_feature (20)..(21): 2'-O-methyl
  misc_feature (26)..(27): 2'-O-methyl
  misc_feature (34)..(35): 2'-O-methyl

SEQ ID NO: 499 - RNA, 33 nt, Artificial Sequence; identical to SEQ ID NO: 475
  Synthetic construct
  misc_feature (3)..(5): 2'-O-methyl
  misc_feature (7)..(7): 2'-O-methyl
  misc_feature (12)..(17): 2'-O-methyl
  misc_feature (20)..(21): 2'-O-methyl
  misc_feature (26)..(27): 2'-O-methyl

SEQ ID NO: 500 - RNA, 31 nt, Artificial Sequence; identical to SEQ ID NO: 476
  Synthetic construct
  misc_feature (3)..(5): 2'-O-methyl
  misc_feature (7)..(7): 2'-O-methyl
  misc_feature (12)..(17): 2'-O-methyl
  misc_feature (20)..(21): 2'-O-methyl
  misc_feature (26)..(27): 2'-O-methyl

SEQ ID NO: 501 - RNA, 29 nt, Artificial Sequence
  Synthetic construct
  misc_feature (3)..(5): 2'-O-methyl
  misc_feature (7)..(7): 2'-O-methyl
  misc_feature (12)..(17): 2'-O-methyl
  misc_feature (20)..(21): 2'-O-methyl
  misc_feature (26)..(27): 2'-O-methyl
ggucuacgagaccucccgguugaaaccgg

SEQ ID NO: 502 - DNA, 40 bp, Artificial Sequence; identical to SEQ ID NO: 478
  Synthetic construct
  misc_feature (1)..(1): 2'-O-methyl
  misc_feature (3)..(3): 2'-O-methyl
  misc_feature (7)..(13): 2'-O-methyl
  misc_feature (15)..(15): 2'-O-methyl
  misc_feature (17)..(17): 2'-O-methyl
  misc_feature (22)..(24): 2'-O-methyl
  misc_feature (26)..(26): 2'-O-methyl
  misc_feature (31)..(36): 2'-O-methyl
  misc_feature (1)..(38): ribonucleotide modified as described
  misc_feature (39)..(39): Phosphorothioate 3'-Internucleotide Linkage

SEQ ID NO: 503 - DNA, 38 bp, Artificial Sequence; identical to SEQ ID NO: 479
  Synthetic construct
  misc_feature (1)..(1): 2'-O-methyl
  misc_feature (5)..(11): 2'-O-methyl
  misc_feature (13)..(13): 2'-O-methyl
  misc_feature (15)..(15): 2'-O-methyl
  misc_feature (20)..(22): 2'-O-methyl
  misc_feature (24)..(24): 2'-O-methyl
  misc_feature (29)..(34): 2'-O-methyl
  misc_feature (1)..(36): ribonucleotide modified as described
  misc_feature (37)..(37): Phosphorothioate 3'-Internucleotide Linkage

SEQ ID NO: 504 - DNA, 36 bp, Artificial Sequence; identical to SEQ ID NO: 480
  Synthetic construct
  misc_feature (3)..(9): 2'-O-methyl
  misc_feature (11)..(11): 2'-O-methyl
  misc_feature (13)..(13): 2'-O-methyl
  misc_feature (18)..(20): 2'-O-methyl
  misc_feature (22)..(22): 2'-O-methyl
  misc_feature (27)..(32): 2'-O-methyl
  misc_feature (1)..(34): ribonucleotide modified as described
  misc_feature (35)..(35): Phosphorothioate 3'-Internucleotide Linkage

SEQ ID NO: 505 - DNA, 34 bp, Artificial Sequence; identical to SEQ ID NO: 481
  Synthetic construct
  misc_feature (1)..(7): 2'-O-methyl
  misc_feature (9)..(9): 2'-O-methyl
  misc_feature (11)..(11): 2'-O-methyl
  misc_feature (16)..(18): 2'-O-methyl
  misc_feature (20)..(20): 2'-O-methyl
  misc_feature (25)..(30): 2'-O-methyl
  misc_feature (1)..(32): ribonucleotide modified as described
  misc_feature (33)..(33): Phosphorothioate 3'-Internucleotide Linkage

SEQ ID NO: 506 - RNA, 40 nt, Artificial Sequence; identical to SEQ ID NO: 482
  Synthetic construct
  misc_feature (3)..(5): 2'-O-methyl
  misc_feature (7)..(7): 2'-O-methyl
  misc_feature (12)..(17): 2'-O-methyl
  misc_feature (20)..(24): 2'-O-methyl
  misc_feature (26)..(26): 2'-O-methyl
  misc_feature (28)..(28): 2'-O-methyl
  misc_feature (31)..(32): 2'-O-methyl
  misc_feature (39)..(40): 2'-O-methyl

SEQ ID NO: 507 - RNA, 38 nt, Artificial Sequence; identical to SEQ ID NO: 483
  Synthetic construct
  misc_feature (3)..(5): 2'-O-methyl
  misc_feature (7)..(7): 2'-O-methyl
  misc_feature (12)..(17): 2'-O-methyl
  misc_feature (20)..(24): 2'-O-methyl
  misc_feature (26)..(26): 2'-O-methyl
  misc_feature (28)..(28): 2'-O-methyl
  misc_feature (31)..(32): 2'-O-methyl

SEQ ID NO: 508 - RNA, 36 nt, Artificial Sequence; identical to SEQ ID NO: 484
  Synthetic construct
  misc_feature (3)..(5): 2'-O-methyl
  misc_feature (7)..(7): 2'-O-methyl
  misc_feature (12)..(17): 2'-O-methyl
  misc_feature (20)..(24): 2'-O-methyl
  misc_feature (26)..(26): 2'-O-methyl
  misc_feature (28)..(28): 2'-O-methyl
  misc_feature (31)..(32): 2'-O-methyl

SEQ ID NO: 509 - RNA, 34 nt, Artificial Sequence; identical to SEQ ID NO: 485
  Synthetic construct
  misc_feature (3)..(5): 2'-O-methyl
  misc_feature (7)..(7): 2'-O-methyl
  misc_feature (12)..(17): 2'-O-methyl
  misc_feature (20)..(24): 2'-O-methyl
  misc_feature (26)..(26): 2'-O-methyl
  misc_feature (28)..(28): 2'-O-methyl
  misc_feature (31)..(32): 2'-O-methyl

SEQ ID NO: 510 - DNA, 23 bp, Artificial Sequence
  Synthetic construct
  misc_feature (1)..(2): 2'-O-methyl
  misc_feature (5)..(7): 2'-O-methyl
  misc_feature (9)..(9): 2'-O-methyl
  misc_feature (14)..(19): 2'-O-methyl
  misc_feature (1)..(21): ribonucleotide modified as described
  misc_feature (22)..(22): Phosphorothioate 3'-Internucleotide Linkage
acggucuacgagaccucccggtt

SEQ ID NO: 511 - DNA, 22 bp, Artificial Sequence
  Synthetic construct
  misc_feature (1)..(1): 2'-O-methyl
  misc_feature (4)..(6): 2'-O-methyl
  misc_feature (8)..(8): 2'-O-methyl
  misc_feature (13)..(18): 2'-O-methyl
  misc_feature (1)..(20): ribonucleotide modified as described
  misc_feature (21)..(21): Phosphorothioate 3'-Internucleotide Linkage
cggucuacgagaccucccggtt

SEQ ID NO: 512 - DNA, 20 bp, Artificial Sequence
  Synthetic construct
  misc_feature (2)..(4): 2'-O-methyl
  misc_feature (6)..(6): 2'-O-methyl
  misc_feature (11)..(16): 2'-O-methyl
  misc_feature (1)..(18): ribonucleotide modified as described
  misc_feature (19)..(19): Phosphorothioate 3'-Internucleotide Linkage
gucuacgagaccucccggtt

SEQ ID NO: 513 - DNA, 19 bp, Artificial Sequence
  Synthetic construct
  misc_feature (1)..(3): 2'-O-methyl
  misc_feature (5)..(5): 2'-O-methyl
  misc_feature (10)..(15): 2'-O-methyl
  misc_feature (1)..(17): ribonucleotide modified as described
  misc_feature (18)..(18): Phosphorothioate 3'-Internucleotide Linkage
ucuacgagaccucccggtt

SEQ ID NO: 514 - DNA, 18 bp, Artificial Sequence
  Synthetic construct
  misc_feature (1)..(2): 2'-O-methyl
  misc_feature (4)..(4): 2'-O-methyl
  misc_feature (9)..(14): 2'-O-methyl
  misc_feature (1)..(16): ribonucleotide modified as described
  misc_feature (17)..(17): Phosphorothioate 3'-Internucleotide Linkage
cuacgagaccucccggtt

SEQ ID NO: 515 - DNA, 17 bp, Artificial Sequence
  Synthetic construct
  misc_feature (1)..(1): 2'-O-methyl
  misc_feature (3)..(3): 2'-O-methyl
  misc_feature (8)..(13): 2'-O-methyl
  misc_feature (1)..(15): ribonucleotide modified as described
  misc_feature (16)..(16): Phosphorothioate 3'-Internucleotide Linkage
uacgagaccucccggtt

SEQ ID NO: 516 - DNA, 16 bp, Artificial Sequence
  Synthetic construct
  misc_feature (2)..(2): 2'-O-methyl
  misc_feature (7)..(12): 2'-O-methyl
  misc_feature (1)..(14): ribonucleotide modified as described
  misc_feature (15)..(15): Phosphorothioate 3'-Internucleotide Linkage
acgagaccucccggtt

SEQ ID NO: 517 - DNA, 15 bp, Artificial Sequence
  Synthetic construct
  misc_feature (1)..(1): 2'-O-methyl
  misc_feature (6)..(11): 2'-O-methyl
  misc_feature (1)..(13): ribonucleotide modified as described
  misc_feature (14)..(14): Phosphorothioate 3'-Internucleotide Linkage
cgagaccucccggtt

SEQ ID NO: 518 - RNA, 21 nt, Artificial Sequence
  Synthetic construct
  misc_feature (3)..(5): 2'-O-methyl
  misc_feature (7)..(7): 2'-O-methyl
  misc_feature (12)..(17): 2'-O-methyl
  misc_feature (20)..(20): Phosphorothioate 3'-Internucleotide Linkage
ggucuacgagaccucccgggg

SEQ ID NO: 519 - RNA, 20 nt, Artificial Sequence
  Synthetic construct
  misc_feature (3)..(5): 2'-O-methyl
  misc_feature (7)..(7): 2'-O-methyl
  misc_feature (12)..(17): 2'-O-methyl
  misc_feature (19)..(19): Phosphorothioate 3'-Internucleotide Linkage
ggucuacgagaccucccggg

SEQ ID NO: 520 - DNA, 20 bp, Artificial Sequence
  Synthetic construct
  misc_feature (3)..(5): 2'-O-methyl
  misc_feature (7)..(7): 2'-O-methyl
  misc_feature (12)..(17): 2'-O-methyl
  misc_feature (19)..(19): Phosphorothioate 3'-Internucleotide Linkage
  misc_feature (1)..(19): ribonucleotide modified as described
ggucuacgagaccucccggt

SEQ ID NO: 521 - RNA, 19 nt, Artificial Sequence
  Synthetic construct
  misc_feature (3)..(5): 2'-O-methyl
  misc_feature (7)..(7): 2'-O-methyl
  misc_feature (12)..(17): 2'-O-methyl
  misc_feature (18)..(18): Phosphorothioate 3'-Internucleotide Linkage
ggucuacgagaccucccgg

SEQ ID NO: 522 - RNA, 18 nt, Artificial Sequence
  Synthetic construct
  misc_feature (3)..(5): 2'-O-methyl
  misc_feature (7)..(7): 2'-O-methyl
  misc_feature (12)..(17): 2'-O-methyl
  misc_feature (17)..(17): Phosphorothioate 3'-Internucleotide Linkage
ggucuacgagaccucccg

SEQ ID NO: 523 - RNA, 17 nt, Artificial Sequence
  Synthetic construct
  misc_feature (3)..(5): 2'-O-methyl
  misc_feature (7)..(7): 2'-O-methyl
  misc_feature (12)..(17): 2'-O-methyl
  misc_feature (16)..(16): Phosphorothioate 3'-Internucleotide Linkage
ggucuacgagaccuccc

SEQ ID NO: 524 - RNA, 16 nt, Artificial Sequence
  Synthetic construct
  misc_feature (3)..(5): 2'-O-methyl
  misc_feature (7)..(7): 2'-O-methyl
  misc_feature (12)..(16): 2'-O-methyl
  misc_feature (15)..(15): Phosphorothioate 3'-Internucleotide Linkage
ggucuacgagaccucc

SEQ ID NO: 525 - RNA, 15 nt, Artificial Sequence
  Synthetic construct
  misc_feature (3)..(5): 2'-O-methyl
  misc_feature (7)..(7): 2'-O-methyl
  misc_feature (12)..(15): 2'-O-methyl
  misc_feature (14)..(14): Phosphorothioate 3'-Internucleotide Linkage
ggucuacgagaccuc

SEQ ID NO: 526 - DNA, 21 bp, Artificial Sequence
  Synthetic construct
  misc_feature (1)..(2): 2'-O-methyl
  misc_feature (1)..(1): 5'-3 attached terminal deoxyabasic moiety
  misc_feature (9)..(12): 2'-O-methyl
  misc_feature (14)..(14): 2'-O-methyl
  misc_feature (18)..(19): 2'-O-methyl
  misc_feature (1)..(20): ribonucleotide modified as described
  misc_feature (21)..(21): 3'-3 attached terminal deoxyabasic moiety
ccgggaggucucguagaccgt

SEQ ID NO: 527 - DNA, 20 bp, Artificial Sequence
  Synthetic construct
  misc_feature (1)..(1): 2'-O-methyl
  misc_feature (1)..(1): 5'-3 attached terminal deoxyabasic moiety
  misc_feature (8)..(11): 2'-O-methyl
  misc_feature (13)..(13): 2'-O-methyl
  misc_feature (17)..(18): 2'-O-methyl
  misc_feature (1)..(18): ribonucleotide modified as described
  misc_feature (20)..(20): 3'-3 attached terminal deoxyabasic moiety
cgggaggucucguagacctt

SEQ ID NO: 528 - DNA, 19 bp, Artificial Sequence
  Synthetic construct
  misc_feature (1)..(1): 5'-3 attached terminal deoxyabasic moiety
  misc_feature (7)..(10): 2'-O-methyl
  misc_feature (12)..(12): 2'-O-methyl
  misc_feature (16)..(17): 2'-O-methyl
  misc_feature (1)..(17): ribonucleotide modified as described
  misc_feature (19)..(19): 3'-3 attached terminal deoxyabasic moiety
gggaggucucguagacctt

SEQ ID NO: 529 - DNA, 18 bp, Artificial Sequence
  Synthetic construct
  misc_feature (1)..(1): 5'-3 attached terminal deoxyabasic moiety
  misc_feature (6)..(9): 2'-O-methyl
  misc_feature (11)..(11): 2'-O-methyl
  misc_feature (15)..(16): 2'-O-methyl
  misc_feature (1)..(16): ribonucleotide modified as described
  misc_feature (18)..(18): 3'-3 attached terminal deoxyabasic moiety
ggaggucucguagacctt

SEQ ID NO: 530 - DNA, 17 bp, Artificial Sequence
  Synthetic construct
  misc_feature (1)..(1): 5'-3 attached terminal deoxyabasic moiety
  misc_feature (5)..(8): 2'-O-methyl
  misc_feature (10)..(10): 2'-O-methyl
  misc_feature (14)..(15): 2'-O-methyl
  misc_feature (1)..(15): ribonucleotide modified as described
  misc_feature (17)..(17): 3'-3 attached terminal deoxyabasic moiety
gaggucucguagacctt

SEQ ID NO: 531 - DNA, 16 bp, Artificial Sequence
  Synthetic construct
  misc_feature (1)..(1): 5'-3 attached terminal deoxyabasic moiety
  misc_feature (4)..(7): 2'-O-methyl
  misc_feature (9)..(9): 2'-O-methyl
  misc_feature (13)..(14): 2'-O-methyl
  misc_feature (1)..(14): ribonucleotide modified as described
  misc_feature (16)..(16): 3'-3 attached terminal deoxyabasic moiety
aggucucguagacctt

SEQ ID NO: 532 - DNA, 20 bp, Artificial Sequence
  Synthetic construct
  misc_feature (1)..(2): 2'-O-methyl
  misc_feature (1)..(1): 5'-3 attached terminal deoxyabasic moiety
  misc_feature (9)..(12): 2'-O-methyl
  misc_feature (14)..(14): 2'-O-methyl
  misc_feature (18)..(19): 2'-O-methyl
  misc_feature (1)..(19): ribonucleotide modified as described
  misc_feature (20)..(20): 3'-3 attached terminal deoxyabasic moiety
ccgggaggucucguagacct

SEQ ID NO: 533 - RNA, 19 nt, Artificial Sequence
  Synthetic construct
  misc_feature (1)..(1): 5'-3 attached terminal deoxyabasic moiety
  misc_feature (1)..(2): 2'-O-methyl
  misc_feature (9)..(12): 2'-O-methyl
  misc_feature (14)..(14): 2'-O-methyl
  misc_feature (18)..(19): 2'-O-methyl
  misc_feature (19)..(19): 3'-3 attached terminal deoxyabasic moiety
ccgggaggucucguagacc

SEQ ID NO: 534 - RNA, 18 nt, Artificial Sequence
  Synthetic construct
  misc_feature (1)..(1): 5'-3 attached terminal deoxyabasic moiety
  misc_feature (1)..(2): 2'-O-methyl
  misc_feature (9)..(12): 2'-O-methyl
  misc_feature (14)..(14): 2'-O-methyl
  misc_feature (18)..(18): 2'-O-methyl
  misc_feature (18)..(18): 3'-3 attached terminal deoxyabasic moiety
ccgggaggucucguagac

SEQ ID NO: 535 - RNA, 17 nt, Artificial Sequence
  Synthetic construct
  misc_feature (1)..(1): 5'-3 attached terminal deoxyabasic moiety
  misc_feature (1)..(2): 2'-O-methyl
  misc_feature (9)..(12): 2'-O-methyl
  misc_feature (14)..(14): 2'-O-methyl
  misc_feature (17)..(17): 3'-3 attached terminal deoxyabasic moiety
ccgggaggucucguaga

SEQ ID NO: 536 - RNA, 16 nt, Artificial Sequence
  Synthetic construct
  misc_feature (1)..(1): 5'-3 attached terminal deoxyabasic moiety
  misc_feature (1)..(2): 2'-O-methyl
  misc_feature (9)..(12): 2'-O-methyl
  misc_feature (14)..(14): 2'-O-methyl
  misc_feature (16)..(16): 3'-3 attached terminal deoxyabasic moiety
ccgggaggucucguag

SEQ ID NO: 537 - DNA, 21 bp, Artificial Sequence
  Synthetic construct
  misc_feature (1)..(19): ribonucleotide modified as described
  misc_feature (1)..(1): 5'-3 attached terminal deoxyabasic moiety
  misc_feature (21)..(21): 3'-3 attached terminal deoxyabasic moiety
cugaguuuaaaaggcaccctt

SEQ ID NO: 538 - DNA, 21 bp, Artificial Sequence
  Synthetic construct
  misc_feature (1)..(19): ribonucleotide modified as described
  misc_feature (20)..(20): Phosphorothioate 3'-Internucleotide Linkage
gggugccuuuuaaacucagtt

SEQ ID NO: 539 - DNA, 21 bp, Artificial Sequence
  Synthetic construct
  misc_feature (1)..(19): ribonucleotide modified as described
  misc_feature (1)..(1): 5'-3 attached terminal deoxyabasic moiety
  misc_feature (21)..(21): 3'-3 attached terminal deoxyabasic moiety
cccacggaaaauuugaguctt

SEQ ID NO: 540 - DNA, 21 bp, Artificial Sequence
  Synthetic construct
  misc_feature (1)..(19): ribonucleotide modified as described
  misc_feature (20)..(20): Phosphorothioate 3'-Internucleotide Linkage
gacucaaauuuuccgugggtt

SEQ ID NO: 541 - RNA, 21 nt, Artificial Sequence
  Synthetic construct
aggugaagcgaagugcacauu

SEQ ID NO: 542 - DNA, 21 bp, Artificial Sequence
  Synthetic construct
  misc_feature (1)..(1): 5'-3 attached terminal deoxyabasic moiety
  misc_feature (1)..(19): ribonucleotide modified as described
  misc_feature (21)..(21): 3'-3 attached terminal deoxyabasic moiety
uccacuucgcuucacgugutt

SEQ ID NO: 543 - DNA, 21 bp, Artificial Sequence
  Synthetic construct
  misc_feature (1)..(19): ribonucleotide modified as described
  misc_feature (20)..(20): Phosphorothioate 3'-Internucleotide Linkage
acacgugaagcgaaguggatt

SEQ ID NO: 544 - DNA, 21 bp, Artificial Sequence
  Synthetic construct
  misc_feature (1)..(1): 2'-deoxy
  misc_feature (1)..(1): 5'-3 attached terminal deoxyabasic moiety
  misc_feature (2)..(2): 2'-deoxy-2'-fluoro
  misc_feature (3)..(6): 2'-deoxy
  misc_feature (7)..(8): 2'-deoxy-2'-fluoro
  misc_feature (9)..(9): 2'-deoxy
  misc_feature (10)..(10): 2'-deoxy-2'-fluoro
  misc_feature (11)..(17): 2'-deoxy
  misc_feature (18)..(18): 2'-deoxy-2'-fluoro
  misc_feature (19)..(19): 2'-deoxy
  misc_feature (1)..(19): ribonucleotide modified as described
  misc_feature (21)..(21): 3'-3 attached terminal deoxyabasic moiety
auaaggcuaugaagagauatt

SEQ ID NO: 545 - DNA, 21 bp, Artificial Sequence
  Synthetic construct
  misc_feature (1)..(1): 2'-deoxy-2'-fluoro
  misc_feature (2)..(2): 2'-O-methyl
  misc_feature (3)..(9): 2'-deoxy-2'-fluoro
  misc_feature (10)..(10): 2'-O-methyl
  misc_feature (11)..(11): 2'-deoxy-2'-fluoro
  misc_feature (12)..(13): 2'-O-methyl
  misc_feature (14)..(17): 2'-deoxy-2'-fluoro
  misc_feature (18)..(18): 2'-O-methyl
  misc_feature (19)..(19): 2'-deoxy-2'-fluoro
  misc_feature (1)..(19): ribonucleotide modified as described
  misc_feature (20)..(20): Phosphorothioate 3'-Internucleotide Linkage
uaucucuucauagccuuautt

SEQ ID NO: 546 - DNA, 21 bp, Artificial Sequence
  Synthetic construct
  misc_feature (1)..(1): 2'-deoxy-2'-fluoro
  misc_feature (1)..(1): 5'-3 attached terminal deoxyabasic moiety
  misc_feature (2)..(2): 2'-deoxy
  misc_feature (3)..(3): 2'-deoxy-2'-fluoro
  misc_feature (4)..(4): 2'-deoxy
  misc_feature (5)..(5): 2'-deoxy-2'-fluoro
  misc_feature (6)..(6): 2'-deoxy
  misc_feature (7)..(7): 2'-deoxy-2'-fluoro
  misc_feature (8)..(9): 2'-deoxy
  misc_feature (10)..(10): 2'-deoxy-2'-fluoro
  misc_feature (11)..(15): 2'-deoxy
  misc_feature (16)..(19): 2'-deoxy-2'-fluoro
  misc_feature (1)..(19): ribonucleotide modified as described
  misc_feature (21)..(21): 3'-3 attached terminal deoxyabasic moiety
cguaugcagugaaaacucutt

SEQ ID NO: 547 - DNA, 21 bp, Artificial Sequence
  Synthetic construct
  misc_feature (1)..(4): 2'-O-methyl
  misc_feature (5)..(9): 2'-deoxy-2'-fluoro
  misc_feature (10)..(10): 2'-O-methyl
  misc_feature (11)..(12): 2'-deoxy-2'-fluoro
  misc_feature (13)..(13): 2'-O-methyl
  misc_feature (14)..(14): 2'-deoxy-2'-fluoro
  misc_feature (15)..(15): 2'-O-methyl
  misc_feature (16)..(16): 2'-deoxy-2'-fluoro
  misc_feature (17)..(17): 2'-O-methyl
  misc_feature (18)..(18): 2'-deoxy-2'-fluoro
  misc_feature (19)..(19): 2'-O-methyl
  misc_feature (1)..(19): ribonucleotide modified as described
  misc_feature (20)..(20): Phosphorothioate 3'-Internucleotide Linkage
agaguuuucacugcauacgtt

SEQ ID NO: 548 - DNA, 21 bp, Artificial Sequence
  Synthetic construct
  misc_feature (1)..(1): 2'-deoxy-2'-fluoro
  misc_feature (1)..(1): 5'-3 attached terminal deoxyabasic moiety
  misc_feature (2)..(3): 2'-deoxy
  misc_feature (4)..(4): 2'-deoxy-2'-fluoro
  misc_feature (5)..(15): 2'-deoxy
  misc_feature (16)..(17): 2'-deoxy-2'-fluoro
  misc_feature (18)..(18): 2'-deoxy
  misc_feature (19)..(19): 2'-deoxy-2'-fluoro
  misc_feature (1)..(19): ribonucleotide modified as described
  misc_feature (21)..(21): 3'-3 attached terminal deoxyabasic moiety
ugacggaaaaagagaucgutt

SEQ ID NO: 549 - DNA, 21 bp, Artificial Sequence
  Synthetic construct
  misc_feature (1)..(1): 2'-O-methyl
  misc_feature (2)..(2): 2'-deoxy-2'-fluoro
  misc_feature (3)..(4): 2'-O-methyl
  misc_feature (5)..(15): 2'-deoxy-2'-fluoro
  misc_feature (16)..(16): 2'-O-methyl
  misc_feature (17)..(18): 2'-deoxy-2'-fluoro
  misc_feature (19)..(19): 2'-O-methyl
  misc_feature (1)..(19): ribonucleotide modified as described
  misc_feature (20)..(20): Phosphorothioate 3'-Internucleotide Linkage
acgaucucuuuuuccgucatt

SEQ ID NO: 550 - DNA, 21 bp, Artificial Sequence
  Synthetic construct
  misc_feature (1)..(3): 2'-deoxy
  misc_feature (1)..(1): 5'-3 attached terminal deoxyabasic moiety
  misc_feature (4)..(5): 2'-deoxy-2'-fluoro
  misc_feature (6)..(6): 2'-deoxy
  misc_feature (7)..(7): 2'-deoxy-2'-fluoro
  misc_feature (8)..(8): 2'-deoxy
  misc_feature (9)..(11): 2'-deoxy-2'-fluoro
  misc_feature (12)..(12): 2'-deoxy
  misc_feature (13)..(13): 2'-deoxy-2'-fluoro
  misc_feature (14)..(16): 2'-deoxy
  misc_feature (17)..(17): 2'-deoxy-2'-fluoro
  misc_feature (18)..(19): 2'-deoxy
  misc_feature (1)..(19): ribonucleotide modified as described
  misc_feature (21)..(21): 3'-3 attached terminal deoxyabasic moiety
gaguuguguuuguggacgatt

SEQ ID NO: 551 - DNA, 21 bp, Artificial Sequence
  Synthetic construct
  misc_feature (1)..(2): 2'-deoxy-2'-fluoro
  misc_feature (3)..(3): 2'-O-methyl
  misc_feature (4)..(6): 2'-deoxy-2'-fluoro
  misc_feature (7)..(7): 2'-O-methyl
  misc_feature (8)..(8): 2'-deoxy-2'-fluoro
  misc_feature (9)..(11): 2'-O-methyl
  misc_feature (12)..(12): 2'-deoxy-2'-fluoro
  misc_feature (13)..(13): 2'-O-methyl
  misc_feature (14)..(14): 2'-deoxy-2'-fluoro
  misc_feature (15)..(16): 2'-O-methyl
  misc_feature (17)..(19): 2'-deoxy-2'-fluoro
  misc_feature (1)..(19): ribonucleotide modified as described
  misc_feature (20)..(20): Phosphorothioate 3'-Internucleotide Linkage
ucguccacaaacacaacuctt

SEQ ID NO: 552 - DNA, 21 bp, Artificial Sequence
  Synthetic construct
  misc_feature (1)..(6): 2'-deoxy
  misc_feature (1)..(1): 5'-3 attached terminal deoxyabasic moiety
  misc_feature (7)..(11): 2'-deoxy-2'-fluoro
  misc_feature (12)..(12): 2'-deoxy
  misc_feature (13)..(13): 2'-deoxy-2'-fluoro
  misc_feature (14)..(18): 2'-deoxy
  misc_feature (19)..(19): 2'-deoxy-2'-fluoro
  misc_feature (1)..(19): ribonucleotide modified as described
  misc_feature (21)..(21): 3'-3 attached terminal deoxyabasic moiety
gagagauccucauaaaggctt

SEQ ID NO: 553 - DNA, 21 bp, Artificial Sequence
  Synthetic construct
  misc_feature (1)..(1): 2'-O-methyl
  misc_feature (2)..(6): 2'-deoxy-2'-fluoro
  misc_feature (7)..(7): 2'-O-methyl
  misc_feature (8)..(8): 2'-deoxy-2'-fluoro
  misc_feature (9)..(13): 2'-O-methyl
  misc_feature (14)..(19): 2'-deoxy-2'-fluoro
  misc_feature (1)..(19): ribonucleotide modified as described
  misc_feature (20)..(20): Phosphorothioate 3'-Internucleotide Linkage
gccuuuaugaggaucucuctt

SEQ ID NO: 554 - DNA, 21 bp, Artificial Sequence
  Synthetic construct
  misc_feature (1)..(1): 2'-deoxy
  misc_feature (1)..(1): 5'-3 attached terminal deoxyabasic moiety
  misc_feature (2)..(2): 2'-deoxy-2'-fluoro
  misc_feature (3)..(8): 2'-deoxy
  misc_feature (9)..(12): 2'-deoxy-2'-fluoro
  misc_feature (13)..(13): 2'-deoxy
  misc_feature (14)..(14): 2'-deoxy-2'-fluoro
  misc_feature (15)..(16): 2'-deoxy
  misc_feature (17)..(17): 2'-deoxy-2'-fluoro
  misc_feature (18)..(18): 2'-deoxy
  misc_feature (19)..(19): 2'-deoxy-2'-fluoro
  misc_feature (1)..(19): ribonucleotide modified as described
  misc_feature (21)..(21): 3'-3 attached terminal deoxyabasic moiety
gcgaaaggccuugugguactt

SEQ ID NO: 555 - DNA, 21 bp, Artificial Sequence
  Synthetic construct
  misc_feature (1)..(1): 2'-O-methyl
  misc_feature (2)..(2): 2'-deoxy-2'-fluoro
  misc_feature (3)..(3): 2'-O-methyl
  misc_feature (4)..(5): 2'-deoxy-2'-fluoro
  misc_feature (6)..(6): 2'-O-methyl
  misc_feature (7)..(7): 2'-deoxy-2'-fluoro
  misc_feature (8)..(11): 2'-O-methyl
  misc_feature (12)..(17): 2'-deoxy-2'-fluoro
  misc_feature (18)..(18): 2'-O-methyl
  misc_feature (19)..(19): 2'-deoxy-2'-fluoro
  misc_feature (1)..(19): ribonucleotide modified as described
  misc_feature (20)..(20): Phosphorothioate 3'-Internucleotide Linkage
guaccacaaggccuuucgctt

SEQ ID NO: 556 - DNA, 21 bp, Artificial Sequence
  Synthetic construct
  misc_feature (1)..(1): 2'-deoxy-2'-fluoro
  misc_feature (1)..(1): 5'-3 attached terminal deoxyabasic moiety
  misc_feature (2)..(7): 2'-deoxy
  misc_feature (8)..(11): 2'-deoxy-2'-fluoro
  misc_feature (12)..(12): 2'-deoxy
  misc_feature (13)..(13): 2'-deoxy-2'-fluoro
  misc_feature (14)..(15): 2'-deoxy
  misc_feature (16)..(16): 2'-deoxy-2'-fluoro
  misc_feature (17)..(17): 2'-deoxy
  misc_feature (18)..(19): 2'-deoxy-2'-fluoro
  misc_feature (1)..(19): ribonucleotide modified as described
  misc_feature (21)..(21): 3'-3 attached terminal deoxyabasic moiety
cgaaaggccuugugguacutt

SEQ ID NO: 557 - DNA, 21 bp, Artificial Sequence
  Synthetic construct
  misc_feature (1)..(2): 2'-O-methyl
  misc_feature (3)..(3): 2'-deoxy-2'-fluoro
  misc_feature (4)..(4): 2'-O-methyl
  misc_feature (5)..(6): 2'-deoxy-2'-fluoro
  misc_feature (7)..(7): 2'-O-methyl
  misc_feature (8)..(8): 2'-deoxy-2'-fluoro
  misc_feature (9)..(12): 2'-O-methyl
  misc_feature (13)..(18): 2'-deoxy-2'-fluoro
  misc_feature (19)..(19): 2'-O-methyl
  misc_feature (1)..(19): ribonucleotide modified as described
  misc_feature (20)..(20): Phosphorothioate 3'-Internucleotide Linkage
aguaccacaaggccuuucgtt

SEQ ID NO: 558 - DNA, 21 bp, Artificial Sequence
  Synthetic construct
  misc_feature (1)..(1): 2'-deoxy
  misc_feature (1)..(1): 5'-3 attached terminal deoxyabasic moiety
  misc_feature (2)..(5): 2'-deoxy-2'-fluoro
  misc_feature (6)..(6): 2'-deoxy
  misc_feature (7)..(7): 2'-deoxy-2'-fluoro
  misc_feature (8)..(9): 2'-deoxy
  misc_feature (10)..(10): 2'-deoxy-2'-fluoro
  misc_feature (11)..(11): 2'-deoxy
  misc_feature (12)..(13): 2'-deoxy-2'-fluoro
  misc_feature (14)..(14): 2'-deoxy
  misc_feature (15)..(17): 2'-deoxy-2'-fluoro
  misc_feature (18)..(19): 2'-deoxy
  misc_feature (1)..(19): ribonucleotide modified as described
  misc_feature (21)..(21): 3'-3 attached terminal deoxyabasic moiety
gccuugugguacugccugatt

SEQ ID NO: 559 - DNA, 21 bp, Artificial Sequence
  Synthetic construct
  misc_feature (1)..(2): 2'-deoxy-2'-fluoro
  misc_feature (3)..(5): 2'-O-methyl
  misc_feature (6)..(6): 2'-deoxy-2'-fluoro
  misc_feature (7)..(8): 2'-O-methyl
  misc_feature (9)..(9): 2'-deoxy-2'-fluoro
  misc_feature (10)..(10): 2'-O-methyl
  misc_feature (11)..(12): 2'-deoxy-2'-fluoro
  misc_feature (13)..(13): 2'-O-methyl
  misc_feature (14)..(14): 2'-deoxy-2'-fluoro
  misc_feature (15)..(18): 2'-O-methyl
  misc_feature (19)..(19): 2'-deoxy-2'-fluoro
  misc_feature (1)..(19): ribonucleotide modified as described
  misc_feature (20)..(20): Phosphorothioate 3'-Internucleotide Linkage
ucaggcaguaccacaaggctt

SEQ ID NO: 560 - DNA, 21 bp, Artificial Sequence
  Synthetic construct
  misc_feature (1)..(2): 2'-deoxy-2'-fluoro
  misc_feature (1)..(1): 5'-3 attached terminal deoxyabasic moiety
  misc_feature (3)..(4): 2'-deoxy
  misc_feature (5)..(5): 2'-deoxy-2'-fluoro
  misc_feature (6)..(9): 2'-deoxy
  misc_feature (10)..(10): 2'-deoxy-2'-fluoro
  misc_feature (11)..(11): 2'-deoxy
  misc_feature (12)..(14): 2'-deoxy-2'-fluoro
  misc_feature (15)..(15): 2'-deoxy
  misc_feature (16)..(16): 2'-deoxy-2'-fluoro
  misc_feature (17)..(19): 2'-deoxy
  misc_feature (1)..(19): ribonucleotide modified as described
  misc_feature (21)..(21): 3'-3 attached terminal deoxyabasic moiety
cugauagggugcuugcgagtt

SEQ ID NO: 561 - DNA, 21 bp, Artificial Sequence
  Synthetic construct
  misc_feature (1)..(2): 2'-O-methyl
  misc_feature (3)..(3): 2'-deoxy-2'-fluoro
  misc_feature (4)..(5): 2'-O-methyl
  misc_feature (6)..(6): 2'-deoxy-2'-fluoro
  misc_feature (7)..(7): 2'-O-methyl
  misc_feature (8)..(9): 2'-deoxy-2'-fluoro
  misc_feature (10)..(10): 2'-O-methyl
  misc_feature (11)..(11): 2'-deoxy-2'-fluoro
  misc_feature (12)..(15): 2'-O-methyl
  misc_feature (16)..(19): 2'-deoxy-2'-fluoro
  misc_feature (1)..(19): ribonucleotide modified as described
  misc_feature (20)..(20): Phosphorothioate 3'-Internucleotide Linkage
ggcaguaccacaaggccuutt

SEQ ID NO: 562 - DNA, 21 bp, Artificial Sequence
  Synthetic construct
  misc_feature (1)..(1): 2'-deoxy-2'-fluoro
  misc_feature (1)..(1): 5'-3 attached terminal deoxyabasic moiety
  misc_feature (2)..(3): 2'-deoxy
  misc_feature (4)..(4): 2'-deoxy-2'-fluoro
  misc_feature (5)..(10): 2'-deoxy
  misc_feature (11)..(13): 2'-deoxy-2'-fluoro
  misc_feature (14)..(14): 2'-deoxy
  misc_feature (15)..(15): 2'-deoxy-2'-fluoro
  misc_feature (16)..(18): 2'-deoxy
  misc_feature (19)..(19): 2'-deoxy-2'-fluoro
  misc_feature (1)..(19): ribonucleotide modified as described
  misc_feature (21)..(21): 3'-3 attached terminal deoxyabasic moiety
ugauagggugcuugcgagutt

SEQ ID NO: 563 - DNA, 21 bp, Artificial Sequence
  Synthetic construct
  misc_feature (1)..(1): 2'-O-methyl
  misc_feature (2)..(4): 2'-deoxy-2'-fluoro
  misc_feature (5)..(5): 2'-O-methyl
  misc_feature (6)..(6): 2'-deoxy-2'-fluoro
  misc_feature (7)..(9): 2'-O-methyl
  misc_feature (10)..(10): 2'-deoxy-2'-fluoro
  misc_feature (11)..(11): 2'-O-methyl
  misc_feature (12)..(15): 2'-deoxy-2'-fluoro
  misc_feature (16)..(16): 2'-O-methyl
  misc_feature (17)..(18): 2'-deoxy-2'-fluoro
  misc_feature (19)..(19): 2'-O-methyl
  misc_feature (1)..(19): ribonucleotide modified as described
  misc_feature (20)..(20): Phosphorothioate 3'-Internucleotide Linkage
acucgcaagcacccuaucatt

SEQ ID NO: 564 - DNA, 21 bp, Artificial Sequence
  Synthetic construct
  misc_feature (1)..(1): 2'-deoxy
  misc_feature (1)..(1): 5'-3 attached terminal deoxyabasic moiety
  misc_feature (2)..(2): 2'-deoxy-2'-fluoro
  misc_feature (3)..(6): 2'-deoxy
  misc_feature (7)..(7): 2'-deoxy-2'-fluoro
  misc_feature (8)..(8): 2'-deoxy
  misc_feature (9)..(11): 2'-deoxy-2'-fluoro
  misc_feature (12)..(12): 2'-deoxy
  misc_feature (13)..(13): 2'-deoxy-2'-fluoro
  misc_feature (14)..(16): 2'-deoxy
  misc_feature (17)..(17): 2'-deoxy-2'-fluoro
  misc_feature (18)..(18): 2'-deoxy
  misc_feature (19)..(19): 2'-deoxy-2'-fluoro
  misc_feature (1)..(19): ribonucleotide modified as described
  misc_feature (21)..(21): 3'-3 attached terminal deoxyabasic moiety
auagggugcuugcgagugctt

SEQ ID NO: 565 - DNA, 21 bp, Artificial Sequence
  Synthetic construct
  misc_feature (1)..(1): 2'-O-methyl
  misc_feature (2)..(2): 2'-deoxy-2'-fluoro
  misc_feature (3)..(3): 2'-O-methyl
  misc_feature (4)..(6): 2'-deoxy-2'-fluoro
  misc_feature (7)..(7): 2'-O-methyl
  misc_feature (8)..(8): 2'-deoxy-2'-fluoro
  misc_feature (9)..(11): 2'-O-methyl
  misc_feature (12)..(12): 2'-deoxy-2'-fluoro
  misc_feature (13)..(13): 2'-O-methyl
  misc_feature (14)..(17): 2'-deoxy-2'-fluoro
  misc_feature (18)..(18): 2'-O-methyl
  misc_feature (19)..(19): 2'-deoxy-2'-fluoro
  misc_feature (1)..(19): ribonucleotide modified as described
  misc_feature (20)..(20): Phosphorothioate 3'-Internucleotide Linkage
gcacucgcaagcacccuautt

SEQ ID NO: 566 - DNA, 21 bp, Artificial Sequence
  Synthetic construct
  misc_feature (1)..(1): 2'-deoxy-2'-fluoro
  misc_feature (1)..(1): 5'-3 attached terminal deoxyabasic moiety
  misc_feature (2)..(2): 2'-deoxy
  misc_feature (3)..(3): 2'-deoxy-2'-fluoro
  misc_feature (4)..(6): 2'-deoxy
  misc_feature (7)..(7): 2'-deoxy-2'-fluoro
  misc_feature (8)..(8): 2'-deoxy
  misc_feature (9)..(12): 2'-deoxy-2'-fluoro
  misc_feature (13)..(18): 2'-deoxy
  misc_feature (19)..(19): 2'-deoxy-2'-fluoro
  misc_feature (1)..(19): ribonucleotide modified as described
  misc_feature (21)..(21): 3'-3 attached terminal deoxyabasic moiety
ugcgagugccccgggaggutt

SEQ ID NO: 567 - DNA, 21 bp, Artificial Sequence
  Synthetic construct
  misc_feature (1)..(3): 2'-O-methyl
  misc_feature (4)..(4): 2'-deoxy-2'-fluoro
  misc_feature (5)..(5): 2'-O-methyl
  misc_feature (6)..(9): 2'-deoxy-2'-fluoro
  misc_feature (10)..(10): 2'-O-methyl
  misc_feature (11)..(12): 2'-deoxy-2'-fluoro
  misc_feature (13)..(15): 2'-O-methyl
  misc_feature (16)..(16): 2'-deoxy-2'-fluoro
  misc_feature (17)..(18): 2'-O-methyl
  misc_feature (19)..(19): 2'-deoxy-2'-fluoro
  misc_feature (1)..(19): ribonucleotide modified as described
  misc_feature (20)..(20): Phosphorothioate 3'-Internucleotide Linkage
aagcacccuaucaggcagutt

SEQ ID NO: 568 - DNA, 21 bp, Artificial Sequence
  Synthetic construct
  misc_feature (1)..(1): 2'-deoxy
  misc_feature (1)..(1): 5'-3 attached terminal deoxyabasic moiety
  misc_feature (2)..(2): 2'-deoxy-2'-fluoro
  misc_feature (3)..(4): 2'-deoxy
  misc_feature (5)..(5): 2'-deoxy-2'-fluoro
  misc_feature (6)..(8): 2'-deoxy
  misc_feature (9)..(16): 2'-deoxy-2'-fluoro
  misc_feature (17)..(18): 2'-deoxy
  misc_feature (19)..(19): 2'-deoxy-2'-fluoro
  misc_feature (1)..(19): ribonucleotide modified as described
  misc_feature (21)..(21): 3'-3 attached terminal deoxyabasic moiety
gugguggacuucucucaautt

SEQ ID NO: 569 - DNA, 21 bp, Artificial Sequence
  Synthetic construct
  misc_feature (1)..(1): 2'-O-methyl
  misc_feature (2)..(3): 2'-deoxy-2'-fluoro
  misc_feature (4)..(11): 2'-O-methyl
  misc_feature (12)..(14): 2'-deoxy-2'-fluoro
  misc_feature (15)..(15): 2'-O-methyl
  misc_feature (16)..(17): 2'-deoxy-2'-fluoro
  misc_feature (18)..(18): 2'-O-methyl
  misc_feature (19)..(19): 2'-deoxy-2'-fluoro
  misc_feature (1)..(19): ribonucleotide modified as described
  misc_feature (20)..(20): Phosphorothioate 3'-Internucleotide Linkage
auugagagaaguccaccactt

SEQ ID NO: 570 - DNA, 21 bp, Artificial Sequence
  Synthetic construct
  misc_feature (1)..(2): 2'-deoxy
  misc_feature (1)..(1): 5'-3 attached terminal deoxyabasic moiety
  misc_feature (3)..(3): 2'-deoxy-2'-fluoro
  misc_feature (4)..(6): 2'-deoxy
  misc_feature (7)..(14): 2'-deoxy-2'-fluoro
  misc_feature (15)..(16): 2'-deoxy
  misc_feature (17)..(19): 2'-deoxy-2'-fluoro
  misc_feature (1)..(19): ribonucleotide modified as described
  misc_feature (21)..(21): 3'-3 attached terminal deoxyabasic moiety
gguggacuucucucaauuutt

SEQ ID NO: 571 - DNA, 21 bp, Artificial Sequence
  Synthetic construct
  misc_feature (1)..(3): 2'-O-methyl
  misc_feature (4)..(5): 2'-deoxy-2'-fluoro
  misc_feature (6)..(13): 2'-O-methyl
  misc_feature (14)..(16): 2'-deoxy-2'-fluoro
  misc_feature (17)..(17): 2'-O-methyl
  misc_feature (18)..(19): 2'-deoxy-2'-fluoro
  misc_feature (1)..(19): ribonucleotide modified as described
  misc_feature (20)..(20): Phosphorothioate 3'-Internucleotide Linkage
aaauugagagaaguccacctt

SEQ ID NO: 572 - DNA, 21 bp, Artificial Sequence
  Synthetic construct
  misc_feature (1)..(3): 2'-deoxy
  misc_feature (1)..(1): 5'-3 attached terminal deoxyabasic moiety
  misc_feature (4)..(11): 2'-deoxy-2'-fluoro
  misc_feature (12)..(13): 2'-deoxy
  misc_feature (14)..(19): 2'-deoxy-2'-fluoro
  misc_feature (1)..(19): ribonucleotide modified as described
  misc_feature (21)..(21): 3'-3 attached terminal deoxyabasic moiety
ggacuucucucaauuuucutt

SEQ ID NO: 573 - DNA, 21 bp, Artificial Sequence
  Synthetic construct
  misc_feature (1)..(6): 2'-O-methyl
  misc_feature (7)..(8): 2'-deoxy-2'-fluoro
  misc_feature (9)..(16): 2'-O-methyl
  misc_feature (17)..(19): 2'-deoxy-2'-fluoro
  misc_feature (1)..(19): ribonucleotide modified as described
  misc_feature (20)..(20): Phosphorothioate 3'-Internucleotide Linkage
agaaaauugagagaagucctt

SEQ ID NO: 574 - DNA, 21 bp, Artificial Sequence
  Synthetic construct
  misc_feature (1)..(1): 2'-deoxy
  misc_feature (1)..(1): 5'-3 attached terminal deoxyabasic moiety
  misc_feature (2)..(2): 2'-deoxy-2'-fluoro
  misc_feature (3)..(3): 2'-deoxy
  misc_feature (4)..(7): 2'-deoxy-2'-fluoro
  misc_feature (8)..(8): 2'-deoxy
  misc_feature (9)..(12): 2'-deoxy-2'-fluoro
  misc_feature (13)..(13): 2'-deoxy
  misc_feature (14)..(18): 2'-deoxy-2'-fluoro
  misc_feature (19)..(19): 2'-deoxy
  misc_feature (1)..(19): ribonucleotide modified as described
  misc_feature (21)..(21): 3'-3 attached terminal deoxyabasic moiety
gcacuucgcuucaccucugtt

SEQ ID NO: 575 - DNA, 21 bp, Artificial Sequence
  Synthetic construct
  misc_feature (1)..(1): 2'-deoxy-2'-fluoro
  misc_feature (2)..(6): 2'-O-methyl
  misc_feature (7)..(7): 2'-deoxy-2'-fluoro
  misc_feature (8)..(11): 2'-O-methyl
  misc_feature (12)..(12): 2'-deoxy-2'-fluoro
  misc_feature (13)..(16): 2'-O-methyl
  misc_feature (17)..(17): 2'-deoxy-2'-fluoro
  misc_feature (18)..(18): 2'-O-methyl
  misc_feature (19)..(19): 2'-deoxy-2'-fluoro
  misc_feature (1)..(19): ribonucleotide modified as described
  misc_feature (20)..(20): Phosphorothioate 3'-Internucleotide Linkage
cagaggugaagcgaagugctt

SEQ ID NO: 576 - DNA, 21 bp, Artificial Sequence
  Synthetic construct
  misc_feature (1)..(1): 2'-deoxy
  misc_feature (1)..(1): 5'-3 attached terminal deoxyabasic moiety
  misc_feature (2)..(5): 2'-deoxy-2'-fluoro
  misc_feature (6)..(6): 2'-deoxy
  misc_feature (7)..(10): 2'-deoxy-2'-fluoro
  misc_feature (11)..(11): 2'-deoxy
  misc_feature (12)..(16): 2'-deoxy-2'-fluoro
  misc_feature (17)..(17): 2'-deoxy
  misc_feature (18)..(18): 2'-deoxy-2'-fluoro
  misc_feature (19)..(19): 2'-deoxy
  misc_feature (1)..(19): ribonucleotide modified as described
  misc_feature (21)..(21): 3'-3 attached terminal deoxyabasic moiety
acuucgcuucaccucugcatt

SEQ ID NO: 577 - DNA, 21 bp, Artificial Sequence
  Synthetic construct
  misc_feature (1)..(1): 2'-deoxy-2'-fluoro
  misc_feature (2)..(2): 2'-O-methyl
  misc_feature (3)..(3): 2'-deoxy-2'-fluoro
  misc_feature (4)..(8): 2'-O-methyl
  misc_feature (9)..(9): 2'-deoxy-2'-fluoro
  misc_feature (10)..(13): 2'-O-methyl
  misc_feature (14)..(14): 2'-deoxy-2'-fluoro
  misc_feature (15)..(18): 2'-O-methyl
  misc_feature (19)..(19): 2'-deoxy-2'-fluoro
  misc_feature (1)..(19): ribonucleotide modified as described
  misc_feature (20)..(20): Phosphorothioate 3'-Internucleotide Linkage
ugcagaggugaagcgaagutt

SEQ ID NO: 578 - DNA, 21 bp, Artificial Sequence
  Synthetic construct
  misc_feature (1)..(1): 2'-O-methyl
  misc_feature (1)..(1): 5'-3 attached terminal deoxyabasic moiety
  misc_feature (3)..(3): 2'-O-methyl
  misc_feature (5)..(5): 2'-O-methyl
  misc_feature (7)..(10): 2'-O-methyl
  misc_feature (12)..(15): 2'-O-methyl
  misc_feature (17)..(19): 2'-O-methyl
  misc_feature (1)..(19): ribonucleotide modified as described
  misc_feature (21)..(21): 3'-3 attached terminal deoxyabasic moiety
ugugcacuucgcuucaccutt

SEQ ID NO: 579 - DNA, 21 bp, Artificial Sequence
  Synthetic construct
  misc_feature (1)..(3): 2'-O-methyl
  misc_feature (1)..(1): 5'-3 attached terminal deoxyabasic moiety
  misc_feature (5)..(8): 2'-O-methyl
  misc_feature (10)..(13): 2'-O-methyl
  misc_feature (15)..(15): 2'-O-methyl
  misc_feature (17)..(17): 2'-O-methyl
  misc_feature (19)..(19): 2'-O-methyl
  misc_feature (1)..(19): ribonucleotide modified as described
  misc_feature (21)..(21): 3'-3 attached terminal deoxyabasic moiety
uccacuucgcuucacgugutt

SEQ ID NO: 580 - DNA, 21 bp, Artificial Sequence
  Synthetic construct
  misc_feature (1)..(1): 5'-3 attached terminal deoxyabasic moiety
  misc_feature (2)..(2): 2'-O-methyl
  misc_feature (4)..(4): 2'-O-methyl
  misc_feature (6)..(6): 2'-O-methyl
  misc_feature (11)..(11): 2'-O-methyl
  misc_feature (16)..(16): 2'-O-methyl
  misc_feature (1)..(19): ribonucleotide modified as described
  misc_feature (21)..(21): 3'-3 attached terminal deoxyabasic moiety
ugugcacuucgcuucaccutt

SEQ ID NO: 581 - DNA, 21 bp, Artificial Sequence
  Synthetic construct
  misc_feature (1)..(1): 5'-3 attached terminal deoxyabasic moiety
  misc_feature (4)..(4): 2'-O-methyl
  misc_feature (9)..(9): 2'-O-methyl
  misc_feature (14)..(14): 2'-O-methyl
  misc_feature (16)..(16): 2'-O-methyl
  misc_feature (18)..(18): 2'-O-methyl
  misc_feature (1)..(19): ribonucleotide modified as described
  misc_feature (21)..(21): 3'-3 attached terminal deoxyabasic moiety
uccacuucgcuucacgugutt

SEQ ID NO: 582 - DNA, 21 bp, Artificial Sequence
  Synthetic construct
  misc_feature (1)..(1): 2'-deoxy-2'-fluoro
  misc_feature (1)..(1): 5'-3 attached terminal deoxyabasic moiety
  misc_feature (2)..(2): 2'-O-methyl
  misc_feature (3)..(3): 2'-deoxy-2'-fluoro
  misc_feature (4)..(4): 2'-O-methyl
  misc_feature (5)..(5): 2'-deoxy-2'-fluoro
  misc_feature (6)..(6): 2'-O-methyl
  misc_feature (7)..(10): 2'-deoxy-2'-fluoro
  misc_feature (11)..(11): 2'-O-methyl
  misc_feature (12)..(15): 2'-deoxy-2'-fluoro
  misc_feature (16)..(16): 2'-O-methyl
  misc_feature (17)..(19): 2'-deoxy-2'-fluoro
  misc_feature (1)..(19): ribonucleotide modified as described
  misc_feature (21)..(21): 3'-3 attached terminal deoxyabasic moiety
ugugcacuucgcuucaccutt

SEQ ID NO: 583 - DNA, 21 bp, Artificial Sequence
  Synthetic construct
  misc_feature (1)..(3): 2'-deoxy-2'-fluoro
  misc_feature (1)..(1): 5'-3 attached terminal deoxyabasic moiety
  misc_feature (4)..(4): 2'-O-methyl
  misc_feature (5)..(8): 2'-deoxy-2'-fluoro
  misc_feature (9)..(9): 2'-O-methyl
  misc_feature (10)..(13): 2'-deoxy-2'-fluoro
  misc_feature (14)..(14): 2'-O-methyl
  misc_feature (15)..(15): 2'-deoxy-2'-fluoro
  misc_feature (16)..(16): 2'-O-methyl
  misc_feature (17)..(17): 2'-deoxy-2'-fluoro
  misc_feature (18)..(18): 2'-O-methyl
  misc_feature (19)..(19): 2'-deoxy-2'-fluoro
  misc_feature (1)..(19): ribonucleotide modified as described
  misc_feature (21)..(21): 3'-3 attached terminal deoxyabasic moiety
uccacuucgcuucacgugutt

SEQ ID NO: 584 - DNA, 20 bp, Artificial Sequence
  Synthetic construct
  misc_feature (4)..(4): 2'-deoxy-2'-Fluoro
  misc_feature (9)..(9): 2'-deoxy-2'-Fluoro
  misc_feature (14)..(14): 2'-deoxy-2'-Fluoro
  misc_feature (16)..(16): 2'-deoxy-2'-Fluoro
  misc_feature (18)..(18): 2'-deoxy-2'-Fluoro
  misc_feature (19)..(19): Phosphorothioate 3'-Internucleotide Linkage
  misc_feature (1)..(18): ribonucleotide modified as described
aggugaagcgaagugcactt

SEQ ID NO: 585 - DNA, 20 bp, Artificial Sequence
  Synthetic construct
  misc_feature (2)..(2): 2'-deoxy-2'-Fluoro
  misc_feature (4)..(4): 2'-deoxy-2'-Fluoro
  misc_feature (6)..(9): 2'-deoxy-2'-Fluoro
  misc_feature (11)..(14): 2'-deoxy-2'-Fluoro
  misc_feature (16)..(18): 2'-deoxy-2'-Fluoro
  misc_feature (1)..(18): ribonucleotide modified as described
gugcacuucgcuucaccutt

SEQ ID NO: 586 - RNA, 18 nt, Artificial Sequence
  Synthetic construct
  misc_feature (1)..(1): 5'-phosphate
  misc_feature (19)..(19): 3'-3 attached terminal deoxyabasic moiety
cacgagucuagacucgug

SEQ ID NO: 587 - DNA, 19 bp, Artificial Sequence
  Synthetic construct
  misc_feature (1)..(17): ribonucleotide modified as described
  misc_feature (19)..(19): 3'-3 attached terminal deoxyabasic moiety
gaguuuaaaaggcaccctt

SEQ ID NO: 588 - DNA, 18 bp, Artificial Sequence
  Synthetic construct
  misc_feature (1)..(16): ribonucleotide modified as described
  misc_feature (18)..(18): 3'-3 attached terminal deoxyabasic moiety
aguuuaaaaggcaccctt

SEQ ID NO: 589 - DNA, 17 bp, Artificial Sequence
  Synthetic construct
  misc_feature (1)..(15): ribonucleotide modified as described
  misc_feature (17)..(17): 3'-3 attached terminal deoxyabasic moiety
guuuaaaaggcaccctt

SEQ ID NO: 590 - DNA, 15 bp, Artificial Sequence
  Synthetic construct
  misc_feature (1)..(13): ribonucleotide modified as described
  misc_feature (15)..(15): 3'-3 attached terminal deoxyabasic moiety
uuaaaaggcaccctt

SEQ ID NO: 591 - DNA, 13 bp, Artificial Sequence
  Synthetic construct
  misc_feature (1)..(11): ribonucleotide modified as described
  misc_feature (13)..(13): 3'-3 attached terminal deoxyabasic moiety
aaaaggcaccctt

SEQ ID NO: 592 - RNA, 19 nt, Artificial Sequence
  Synthetic construct
  misc_feature (1)..(1): 5'-3 attached terminal deoxyabasic moiety
cugaguuuaaaaggcaccc

SEQ ID NO: 593 - RNA, 18 nt, Artificial Sequence
  Synthetic construct
  misc_feature (1)..(1): 5'-3 attached terminal deoxyabasic moiety
cugaguuuaaaaggcacc

SEQ ID NO: 594 - RNA, 17 nt, Artificial Sequence
  Synthetic construct
  misc_feature (1)..(1): 5'-3 attached terminal deoxyabasic moiety
cugaguuuaaaaggcac

SEQ ID NO: 595 - RNA, 15 nt, Artificial Sequence
  Synthetic construct
  misc_feature (1)..(1): 5'-3 attached terminal deoxyabasic moiety
cugaguuuaaaaggc

SEQ ID NO: 596 - DNA, 20 bp, Artificial Sequence
  Synthetic construct
  misc_feature (19)..(19): Phosphorothioate 3'-Internucleotide Linkage
  misc_feature (1)..(18): ribonucleotide modified as described
ggugccuuuuaaacucagtt

SEQ ID NO: 597 - DNA, 19 bp, Artificial Sequence
  Synthetic construct
  misc_feature (18)..(18): Phosphorothioate 3'-Internucleotide Linkage
  misc_feature (1)..(17): ribonucleotide modified as described
gugccuuuuaaacucagtt

SEQ ID NO: 598 - DNA, 18 bp, Artificial Sequence
  Synthetic construct
  misc_feature (17)..(17): Phosphorothioate 3'-Internucleotide Linkage
  misc_feature (1)..(16): ribonucleotide modified as described
ugccuuuuaaacucagtt

SEQ ID NO: 599 - DNA, 17 bp, Artificial Sequence
  Synthetic construct
  misc_feature (16)..(16): Phosphorothioate 3'-Internucleotide Linkage
  misc_feature (1)..(15): ribonucleotide modified as described
gccuuuuaaacucagtt

SEQ ID NO: 600 - DNA, 16 bp, Artificial Sequence
  Synthetic construct
  misc_feature (15)..(15): Phosphorothioate 3'-Internucleotide Linkage
  misc_feature (1)..(14): ribonucleotide modified as described
ccuuuuaaacucagtt

SEQ ID NO: 601 - DNA, 20 bp, Artificial Sequence
  Synthetic construct
  misc_feature (1)..(19): ribonucleotide modified as described
gggugccuuuuaaacucagt

SEQ ID NO: 602 - RNA, 19 nt, Artificial Sequence
  Synthetic construct
gggugccuuuuaaacucag

SEQ ID NO: 603 - RNA, 18 nt, Artificial Sequence
  Synthetic construct
gggugccuuuuaaacuca

SEQ ID NO: 604 - RNA, 17 nt, Artificial Sequence
  Synthetic construct
gggugccuuuuaaacuc

SEQ ID NO: 605 - RNA, 16 nt, Artificial Sequence
  Synthetic construct
gggugccuuuuaaacu

SEQ ID NO: 606 - RNA, 14 nt, Artificial Sequence
  Synthetic construct
gggugccuuuuaaa

SEQ ID NO: 607 - RNA, 12 nt, Artificial Sequence
  Synthetic construct
gggugccuuuua

SEQ ID NO: 608 - RNA, 19 nt, Artificial Sequence
  Synthetic construct
  misc_feature (1)..(3): 2'-deoxy-2'-Fluoro
  misc_feature (5)..(8): 2'-deoxy-2'-Fluoro
  misc_feature (11)..(11): 2'-deoxy-2'-Fluoro
  misc_feature (13)..(14): 2'-deoxy-2'-Fluoro
  misc_feature (16)..(18): 2'-deoxy-2'-Fluoro
uucaccuugaugccguucu

SEQ ID NO: 609 - RNA, 19 nt, Artificial Sequence
  Synthetic construct
  misc_feature (2)..(3): 2'-deoxy-2'-Fluoro
  misc_feature (6)..(6): 2'-deoxy-2'-Fluoro
  misc_feature (9)..(11): 2'-deoxy-2'-Fluoro
  misc_feature (14)..(14): 2'-deoxy-2'-Fluoro
  misc_feature (16)..(16): 2'-deoxy-2'-Fluoro
gccagcaguccagcauggu

SEQ ID NO: 610 - RNA, 19 nt, Artificial Sequence
  Synthetic construct
  misc_feature (1)..(1): 2'-deoxy-2'-Fluoro
  misc_feature (4)..(4): 2'-deoxy-2'-Fluoro
  misc_feature (6)..(6): 2'-deoxy-2'-Fluoro
  misc_feature (9)..(11): 2'-deoxy-2'-Fluoro
  misc_feature (14)..(14): 2'-deoxy-2'-Fluoro
  misc_feature (17)..(18): 2'-deoxy-2'-Fluoro
ugguacgaccugacgaccg

SEQ ID NO: 611 - DNA, 20 bp, Artificial Sequence
  Synthetic construct
  misc_feature (1)..(18): ribonucleotide modified as described
gacuucucucaauuuucutt

SEQ ID NO: 612 - DNA, 20 bp, Artificial Sequence
  Synthetic construct
  misc_feature (1)..(18): ribonucleotide modified as described
agaaaauugagagaaguctt

SEQ ID NO: 613 - DNA, 19 bp, Artificial Sequence
  Synthetic construct
  misc_feature (1)..(17): ribonucleotide modified as described
acuucucucaauuuucutt

SEQ ID NO: 614 - DNA, 19 bp, Artificial Sequence
  Synthetic construct
  misc_feature (1)..(17): ribonucleotide modified as described
agaaaauugagagaagutt

SEQ ID NO: 615 - DNA, 18 bp, Artificial Sequence
  Synthetic construct
  misc_feature (1)..(16): ribonucleotide modified as described
cuucucucaauuuucutt

SEQ ID NO: 616 - DNA, 18 bp, Artificial Sequence
  Synthetic construct
  misc_feature (1)..(16): ribonucleotide modified as described
agaaaauugagagaagtt

SEQ ID NO: 617 - DNA, 17 bp, Artificial Sequence
  Synthetic construct
  misc_feature (1)..(15): ribonucleotide modified as described
uucucucaauuuucutt

SEQ ID NO: 618 - DNA, 17 bp, Artificial Sequence
  Synthetic construct
  misc_feature (1)..(15): ribonucleotide modified as described
agaaaauugagagaatt

SEQ ID NO: 619 - DNA, 16 bp, Artificial Sequence
  Synthetic construct
  misc_feature (1)..(14): ribonucleotide modified as described
ucucucaauuuucutt

SEQ ID NO: 620 - DNA, 16 bp, Artificial Sequence
  Synthetic construct
  misc_feature (1)..(14): ribonucleotide modified as described
agaaaauugagagatt

SEQ ID NO: 621 - DNA, 20 bp, Artificial Sequence
  Synthetic construct
  misc_feature (6)..(6): 2'-deoxy-2'-Fluoro
  misc_feature (11)..(11): 2'-deoxy-2'-Fluoro
  misc_feature (16)..(16): 2'-deoxy-2'-Fluoro
  misc_feature (18)..(18): 2'-deoxy-2'-Fluoro
  misc_feature (19)..(19): Phosphorothioate 3'-Internucleotide Linkage
  misc_feature (1)..(18): ribonucleotide modified as described
agaggugaagcgaagugctt

SEQ ID NO: 622 - DNA, 20 bp, Artificial Sequence
  Synthetic construct
  misc_feature (1)..(3): 2'-O-methyl
  misc_feature (6)..(6): 2'-deoxy-2'-Fluoro
  misc_feature (11)..(11): 2'-deoxy-2'-Fluoro
  misc_feature (16)..(16): 2'-deoxy-2'-Fluoro
  misc_feature (18)..(18): 2'-deoxy-2'-Fluoro
  misc_feature (19)..(19): Phosphorothioate 3'-Internucleotide Linkage
  misc_feature (1)..(18): ribonucleotide modified as described
agaggugaagcgaagugctt

SEQ ID NO: 623 - RNA, 19 nt, Artificial Sequence
  Synthetic construct
auaaggcuaugaagagaua

SEQ ID NO: 624 - RNA, 19 nt, Artificial Sequence
  Synthetic construct
gaguuguguuuguggacga

SEQ ID NO: 625 - RNA, 19 nt, Artificial Sequence
  Synthetic construct
gaacacuucuucaucguug

SEQ ID NO: 626 - RNA, 19 nt, Artificial Sequence
  Synthetic construct
augccgguguugggcgcgu

SEQ ID NO: 627 - RNA, 19 nt, Artificial Sequence
  Synthetic construct
ccuuauugguaugggcaaa

SEQ ID NO: 628 - RNA, 19 nt, Artificial Sequence
  Synthetic construct
cucuucuuauuuauggcga

SEQ ID NO: 629 - RNA, 19 nt, Artificial Sequence
  Synthetic construct
uguucuugauucauuuauu

SEQ ID NO: 630 - RNA, 19 nt, Artificial Sequence
  Synthetic construct
ggcauuucauuauagcuau

SEQ ID NO: 631 - RNA, 19 nt, Artificial Sequence
  Synthetic construct
uaucucuucauagccuuau

SEQ ID NO: 632 - RNA, 19 nt, Artificial Sequence
  Synthetic construct
ucguccacaaacacaacuc

SEQ ID NO: 633 - RNA, 19 nt, Artificial Sequence
  Synthetic construct
caacgaugaagaaguguuc

SEQ ID NO: 634 - RNA, 19 nt, Artificial Sequence
  Synthetic construct
acgcgcccaacaccggcau

SEQ ID NO: 635 - RNA, 19 nt, Artificial Sequence
  Synthetic construct
uuugcccauaccaauaagg

SEQ ID NO: 636 - RNA, 19 nt, Artificial Sequence
  Synthetic construct
ucgccauaaauaagaagag

SEQ ID NO: 637 - RNA, 19 nt, Artificial Sequence
  Synthetic construct
aauaaaugaaucaagaaca

SEQ ID NO: 638 - RNA, 19 nt, Artificial Sequence
  Synthetic construct
auagcuauaaugaaaugcc

SEQ ID NO: 639 - RNA, 19 nt, Artificial Sequence
  Synthetic construct
auugcuuuuacagaugcac

SEQ ID NO: 640 - RNA, 19 nt, Artificial Sequence
  Synthetic construct
caucacuuacgcugaguac

SEQ ID NO: 641 - RNA, 19 nt, Artificial Sequence
  Synthetic construct
ucuucaauucuuuaugccg

SEQ ID NO: 642 - RNA, 19 nt, Artificial Sequence
  Synthetic construct
uauaaugaacgugaauugc

SEQ ID NO: 643 - RNA, 19 nt, Artificial Sequence
  Synthetic construct
auaaugaacgugaauugcu

SEQ ID NO: 644 - RNA, 19 nt, Artificial Sequence
  Synthetic construct
auuaccagggauuucaguc

SEQ ID NO: 645 - RNA, 19 nt, Artificial Sequence
  Synthetic construct
ucacaucucaucuaccucc

SEQ ID NO: 646 - RNA, 19 nt, Artificial Sequence
  Synthetic construct
ucuggaucuacuggucugc

SEQ ID NO: 647 - RNA, 19 nt, Artificial Sequence
  Synthetic construct
auuuuuggcaaucaaauca

SEQ ID NO: 648 - RNA, 19 nt, Artificial Sequence
  Synthetic construct
gauauuugauauguggauu

SEQ ID NO: 649 - RNA, 19 nt, Artificial Sequence
  Synthetic construct
auuugauauguggauuucg

SEQ ID NO: 650 - RNA, 19 nt, Artificial Sequence
  Synthetic construct
uuugauauguggauuucga

SEQ ID NO: 651 - RNA, 19 nt, Artificial Sequence
  Synthetic construct
auauguggauuucgagucg

SEQ ID NO: 652 - RNA, 19 nt, Artificial Sequence
  Synthetic construct
aagaagagcuguuucugag

SEQ ID NO: 653 - RNA, 19 nt, Artificial Sequence
  Synthetic construct
uucuccuucuucgccaaaa

SEQ ID NO: 654 - RNA, 19 nt, Artificial Sequence
  Synthetic construct
ucuccuucuucgccaaaag

SEQ ID NO: 655 - RNA, 19 nt, Artificial Sequence
  Synthetic construct
cuccuucuucgccaaaagc

SEQ ID NO: 656 - RNA, 19 nt, Artificial Sequence
  Synthetic construct
uugacaaauacgauuuauc

SEQ ID NO: 657 - RNA, 19 nt, Artificial Sequence
  Synthetic construct
cuucugguggcgcuccccu

SEQ ID NO: 658 - RNA, 19 nt, Artificial Sequence
  Synthetic construct
ccauuuuuugaagcgaagg

SEQ ID NO: 659 - RNA, 19 nt, Artificial Sequence
  Synthetic construct
cauuuuuugaagcgaaggu

SEQ ID NO: 660 - RNA, 19 nt, Artificial Sequence
  Synthetic construct
cuucuucaucguugaccgc

SEQ ID NO: 661 - RNA, 19 nt, Artificial Sequence
  Synthetic construct
aucagguggcucccgcuga

SEQ ID NO: 662 - RNA, 19 nt, Artificial Sequence
  Synthetic construct
ucaaguaacaaccgcgaaa

SEQ ID NO: 663 - RNA, 19 nt, Artificial Sequence
  Synthetic construct
caaguaacaaccgcgaaaa

SEQ ID NO: 664 - RNA, 19 nt, Artificial Sequence
  Synthetic construct
gugcaucuguaaaagcaau

SEQ ID NO: 665 - RNA, 19 nt, Artificial Sequence
  Synthetic construct
guacucagcguaagugaug

SEQ ID NO: 666 - RNA, 19 nt, Artificial Sequence
  Synthetic construct
cggcauaaagaauugaaga

SEQ ID NO: 667 - RNA, 19 nt, Artificial Sequence
  Synthetic construct
gcaauucacguucauuaua

SEQ ID NO: 668 - RNA, 19 nt, Artificial Sequence
  Synthetic construct
agcaauucacguucauuau

SEQ ID NO: 669 - RNA, 19 nt, Artificial Sequence
  Synthetic construct
gacugaaaucccugguaau

SEQ ID NO: 670 - RNA, 19 nt, Artificial Sequence
  Synthetic construct
ggagguagaugagauguga

SEQ ID NO: 671 - RNA, 19 nt, Artificial Sequence
  Synthetic construct
gcagaccaguagauccaga

SEQ ID NO: 672 - RNA, 19 nt, Artificial Sequence
  Synthetic construct
ugauuugauugccaaaaau

SEQ ID NO: 673 - RNA, 19 nt, Artificial Sequence
  Synthetic construct
aauccacauaucaaauauc

SEQ ID NO: 674 - RNA, 19 nt, Artificial Sequence
  Synthetic construct
cgaaauccacauaucaaau

SEQ ID NO: 675 - RNA, 19 nt, Artificial Sequence
  Synthetic construct
ucgaaauccacauaucaaa

SEQ ID NO: 676 - RNA, 19 nt, Artificial Sequence
  Synthetic construct
cgacucgaaauccacauau

SEQ ID NO: 677 - RNA, 19 nt, Artificial Sequence
  Synthetic construct
cucagaaacagcucuucuu

SEQ ID NO: 678 - RNA, 19 nt, Artificial Sequence
  Synthetic construct
uuuuggcgaagaaggagaa

SEQ ID NO: 679 - RNA, 19 nt, Artificial Sequence
  Synthetic construct
cuuuuggcgaagaaggaga

SEQ ID NO: 680 - RNA, 19 nt, Artificial Sequence
  Synthetic construct
gcuuuuggcgaagaaggag

SEQ ID NO: 681 - RNA, 19 nt, Artificial Sequence
  Synthetic construct
gauaaaucguauuugucaa

SEQ ID NO: 682 - RNA, 19 nt, Artificial Sequence
  Synthetic construct
aggggagcgccaccagaag

SEQ ID NO: 683 - RNA, 19 nt, Artificial Sequence
  Synthetic construct
ccuucgcuucaaaaaaugg

SEQ ID NO: 684 - RNA, 19 nt, Artificial Sequence
  Synthetic construct
accuucgcuucaaaaaaug

SEQ ID NO: 685 - RNA, 19 nt, Artificial Sequence
  Synthetic construct
gcggucaacgaugaagaag

SEQ ID NO: 686 - RNA, 19 nt, Artificial Sequence
  Synthetic construct
ucagcgggagccaccugau

SEQ ID NO: 687 - RNA, 19 nt, Artificial Sequence
  Synthetic construct
uuucgcgguuguuacuuga

SEQ ID NO: 688 - RNA, 19 nt, Artificial Sequence
  Synthetic construct
uuuucgcgguuguuacuug

SEQ ID NO: 689 - RNA, 19 nt, Artificial Sequence
  Synthetic construct
  misc_feature (4)..(11): 2'-deoxy-2'-Fluoro
  misc_feature (14)..(19): 2'-deoxy-2'-Fluoro
ggacuucucucaauuuucu

SEQ ID NO: 690 - RNA, 19 nt, Artificial Sequence
  Synthetic construct
  misc_feature (7)..(8): 2'-deoxy-2'-Fluoro
  misc_feature (17)..(19): 2'-deoxy-2'-Fluoro
agaaaauugagagaagucc

SEQ ID NO: 691 - RNA, 19 nt, Artificial Sequence
  Synthetic construct
agaaaauugagagaagucc

SEQ ID NO: 692 - RNA, 19 nt, Artificial Sequence
  Synthetic construct
auccugaaucaccacaucc

SEQ ID NO: 693 - RNA, 19 nt, Artificial Sequence
  Synthetic construct
cugaguuuaaaaggcaccc

SEQ ID NO: 694 - RNA, 19 nt, Artificial Sequence
  Synthetic construct
  misc_feature (1)..(1): 5'-3 attached terminal deoxyabasic moiety
gggugccuuuuaaacucag

SEQ ID NO: 695 - RNA, 19 nt, Artificial Sequence
  Synthetic construct
  misc_feature (1)..(2): 2'-deoxy-2'-Fluoro
  misc_feature (6)..(8): 2'-deoxy-2'-Fluoro
  misc_feature (15)..(15): 2'-deoxy-2'-Fluoro
  misc_feature (17)..(19): 2'-deoxy-2'-Fluoro
cugaguuuaaaaggcaccc

SEQ ID NO: 696 - RNA, 19 nt, Artificial Sequence
  Synthetic construct
  misc_feature (4)..(4): 2'-deoxy-2'-Fluoro
  misc_feature (6)..(11): 2'-deoxy-2'-Fluoro
  misc_feature (15)..(17): 2'-deoxy-2'-Fluoro
gggugccuuuuaaacucag

SEQ ID NO: 697 - RNA, 31 nt, Artificial Sequence
  Synthetic construct
  misc_feature (1)..(1): 5'-phosphate
  misc_feature (31)..(31): 3'-3 attached terminal deoxyabasic moiety
acccuaucaggcaguaccaguacugccugau

SEQ ID NO: 698 - RNA, 31 nt, Artificial Sequence
  Synthetic construct
  misc_feature (1)..(1): 5'-phosphate
  misc_feature (31)..(31): 3'-3 attached terminal deoxyabasic moiety
acccuaucaggcaguaccgguacugccugau

SEQ ID NO: 699 - RNA, 31 nt, Artificial Sequence
  Synthetic construct
  misc_feature (1)..(1): 5'-phosphate
  misc_feature (31)..(31): 3'-3 attached terminal deoxyabasic moiety
ggucuacgagaccucccggaggucucguaga

SEQ ID NO: 700 - RNA, 28 nt, Artificial Sequence
  Synthetic construct
  misc_feature (1)..(1): 5'-phosphate
  misc_feature (28)..(28): 3'-3 attached terminal deoxyabasic moiety
ggucuacgagaccuccggaggucucgua

SEQ ID NO: 701 - RNA, 28 nt, Artificial Sequence
  Synthetic construct
  misc_feature (1)..(1): 5'-phosphate
  misc_feature (28)..(28): 3'-3 attached terminal deoxyabasic moiety
gggugccuuuuaaacucgaguuuaaaag

SEQ ID NO: 702 - RNA, 30 nt, Artificial Sequence
  Synthetic construct
  misc_feature (1)..(1): 5'-phosphate
  misc_feature (30)..(30): 3'-3 attached terminal deoxyabasic moiety
gggugccuuuuaaacucaggaguuuaaaag

SEQ ID NO: 703 - RNA, 32 nt, Artificial Sequence
  Synthetic construct
  misc_feature (1)..(1): 5'-phosphate
  misc_feature (32)..(32): 3'-3 attached terminal deoxyabasic moiety
caucagaggcccuccuugcaaggagggccucu

SEQ ID NO: 704 - RNA, 31 nt, Artificial Sequence
  Synthetic construct
  misc_feature (1)..(1): 5'-phosphate
  misc_feature (31)..(31): 3'-3 attached terminal deoxyabasic moiety
caucagaggcccuccuuaaggagggccucug

SEQ ID NO: 705 - RNA, 29 nt, Artificial Sequence
  Synthetic construct
  misc_feature (1)..(1): 5'-phosphate
  misc_feature (29)..(29): 3'-3 attached terminal deoxyabasic moiety
caucagaggcccuccuaggagggccucug

SEQ ID NO: 706 - RNA, 33 nt, Artificial Sequence
  Synthetic construct
  misc_feature (1)..(1): 5'-phosphate
  misc_feature (33)..(33): 3'-3 attached terminal deoxyabasic moiety
guucugcgacauucggcuugccgaaugucgcca

SEQ ID NO: 707 - RNA, 31 nt, Artificial Sequence
  Synthetic construct
  misc_feature (1)..(1): 5'-phosphate
  misc_feature (31)..(31): 3'-3 attached terminal deoxyabasic moiety
guucugcgacauucggcgccgaaugucgcca

SEQ ID NO: 708 - RNA, 30 nt, Artificial Sequence
  Synthetic construct
  misc_feature (30)..(30): 3'-3 attached terminal deoxyabasic moiety
aggugaagcgaagugcacacuucgcuucau

SEQ ID NO: 709 - RNA, 25 nt, Artificial Sequence
  Synthetic construct
  misc_feature (1)..(1): 5'-phosphate
  misc_feature (25)..(25): 3'-3 attached terminal deoxyabasic moiety
aggugaagcgaagugcacuucgcuu

SEQ ID NO: 710 - RNA, 26 nt, Artificial Sequence
  Synthetic construct
  misc_feature (1)..(1): 5'-phosphate
  misc_feature (26)..(26): 3'-3 attached terminal deoxyabasic moiety
aggugaagcgaagugcacuucgcuuc

SEQ ID NO: 711 - RNA, 28 nt, Artificial Sequence
  Synthetic construct
  misc_feature (1)..(1): 5'-phosphate
  misc_feature (28)..(28): 3'-3 attached terminal deoxyabasic moiety
aggugaagcgaagugcacuucgcuucac

SEQ ID NO: 712 - RNA, 26 nt, Artificial Sequence
  Synthetic construct
  misc_feature (1)..(1): 5'-phosphate
  misc_feature (26)..(26): 3'-3 attached terminal deoxyabasic moiety
aggugaagcgaaguacuucgcuucac

SEQ ID NO: 713 - RNA, 30 nt, Artificial Sequence
  Synthetic construct
  misc_feature (1)..(1): 5'-phosphate
  misc_feature (30)..(30): 3'-3 attached terminal deoxyabasic moiety
gugcugggugccuuuuaaaaggcacccagc

SEQ ID NO: 714 - RNA, 28 nt, Artificial Sequence
  Synthetic construct
  misc_feature (1)..(1): 5'-phosphate
  misc_feature (28)..(28): 3'-3 attached terminal deoxyabasic moiety
gugcugggugccuuuaaaggcacccagc

SEQ ID NO: 715 - RNA, 26 nt, Artificial Sequence
  Synthetic construct
  misc_feature (1)..(1): 5'-phosphate
  misc_feature (26)..(26): 3'-3 attached terminal deoxyabasic moiety
gugcugggugccuuaaggcacccagc

SEQ ID NO: 716 - RNA, 27 nt, Artificial Sequence
  Synthetic construct
  misc_feature (1)..(1): 5'-phosphate
  misc_feature (27)..(27): 3'-3 attached terminal deoxyabasic moiety
aaugcuuuaucauauauaugauaaagc

SEQ ID NO: 717 - RNA, 25 nt, Artificial Sequence
  Synthetic construct
  misc_feature (1)..(1): 5'-phosphate
  misc_feature (25)..(25): 3'-3 attached terminal deoxyabasic moiety
aaugcuuuaucauauaugauaaagc

SEQ ID NO: 718 - RNA, 23 nt, Artificial Sequence
  Synthetic construct
  misc_feature (1)..(1): 5'-phosphate
  misc_feature (23)..(23): 3'-3 attached terminal deoxyabasic moiety
aaugcuuuaucauaugauaaagc

SEQ ID NO: 719 - RNA, 24 nt, Artificial Sequence
  Synthetic construct
  misc_feature (1)..(1): 5'-phosphate
  misc_feature (24)..(24): 3'-3 attached terminal deoxyabasic moiety
aaugcuuuaucauaugauaaagca

SEQ ID NO: 720 - RNA, 28 nt, Artificial Sequence
  Synthetic construct
  misc_feature (1)..(1): 5'-phosphate
  misc_feature (28)..(28): 3'-3 attached terminal deoxyabasic moiety
aaugcuuuaucauauaugauaaagcauu

SEQ ID NO: 721 - RNA, 26 nt, Artificial Sequence
  Synthetic construct
  misc_feature (1)..(1): 5'-phosphate
  misc_feature (26)..(26): 3'-3 attached terminal deoxyabasic moiety
aaugcuuuaucauaugauaaagcauu

SEQ ID NO: 722 - RNA, 31 nt, Artificial Sequence
  Synthetic construct
  misc_feature (1)..(1): 5'-phosphate
  misc_feature (31)..(31): 3'-3 attached terminal deoxyabasic moiety
gggugccuuuuaaacucaggaguuuaaaagg

SEQ ID NO: 723 - RNA, 31 nt, Artificial Sequence
  Synthetic construct
  misc_feature (1)..(1): 5'-phosphate
  misc_feature (31)..(31): 3'-3 attached terminal deoxyabasic moiety
gggugccuuuuaaacucgaguuuaaaaggca

SEQ ID NO: 724 - RNA, 27 nt, Artificial Sequence
  Synthetic construct
  misc_feature (1)..(1): 5'-phosphate
  misc_feature (27)..(27): 3'-3 attached terminal deoxyabasic moiety
gggugccuuuuaaacuaguuuaaaagg

SEQ ID NO: 725 - RNA, 28 nt, Artificial Sequence
  Synthetic construct
  misc_feature (1)..(1): 5'-phosphate
  misc_feature (28)..(28): 3'-3 attached terminal deoxyabasic moiety
gggugccuuuuaaacuaguuuaaaaggc

SEQ ID NO: 726 - RNA, 29 nt, Artificial Sequence
  Synthetic construct
  misc_feature (1)..(1): 5'-phosphate
  misc_feature (29)..(29): 3'-3 attached terminal deoxyabasic moiety
gggugccuuuuaaacuaguuuaaaaggca

SEQ ID NO: 727 - RNA, 30 nt, Artificial Sequence
  Synthetic construct
  misc_feature (1)..(1): 5'-phosphate
  misc_feature (30)..(30): 3'-3 attached terminal deoxyabasic moiety
gggugccuuuuaaacuaguuuaaaaggcac

SEQ ID NO: 728 - RNA, 26 nt, Artificial Sequence
  Synthetic construct
  misc_feature (1)..(1): 5'-phosphate
  misc_feature (26)..(26): 3'-3 attached terminal deoxyabasic moiety
gggugccuuuuaaacguuuaaaaggc

SEQ ID NO: 729 - RNA, 27 nt, Artificial Sequence
  Synthetic construct
  misc_feature (1)..(1): 5'-phosphate
  misc_feature (27)..(27): 3'-3 attached terminal deoxyabasic moiety
gggugccuuuuaaacguuuaaaaggca

SEQ ID NO: 730 - RNA, 28 nt, Artificial Sequence
  Synthetic construct
  misc_feature (1)..(1): 5'-phosphate
  misc_feature (28)..(28): 3'-3 attached terminal deoxyabasic moiety
gggugccuuuuaaacguuuaaaaggcac

SEQ ID NO: 731 - RNA, 29 nt, Artificial Sequence
  Synthetic construct
  misc_feature (1)..(1): 5'-phosphate
  misc_feature (29)..(29): 3'-3 attached terminal deoxyabasic moiety
ugcugggugccuuuuaaaaggcacccagc

SEQ ID NO: 732 - RNA, 28 nt, Artificial Sequence
  Synthetic construct
  misc_feature (1)..(1): 5'-phosphate
  misc_feature (28)..(28): 3'-3 attached terminal deoxyabasic moiety
gcugggugccuuuuaaaaggcacccagc

SEQ ID NO: 733 - RNA, 29 nt, Artificial Sequence
  Synthetic construct
  misc_feature (1)..(1): 5'-phosphate
  misc_feature (29)..(29): 3'-3 attached terminal deoxyabasic moiety
gcugggugccuuuuaaaaggcacccagcn

SEQ ID NO: 734 - RNA, 27 nt, Artificial Sequence
  Synthetic construct
  misc_feature (1)..(1): 5'-phosphate
  misc_feature (27)..(27): 3'-3 attached terminal deoxyabasic moiety
gcugggugccuuuuaaaaggcacccag

SEQ ID NO: 735 - RNA, 26 nt, Artificial Sequence
  Synthetic construct
  misc_feature (1)..(1): 5'-phosphate
  misc_feature (26)..(26): 3'-3 attached terminal deoxyabasic moiety
cugggugccuuuuaaaaggcacccag

SEQ ID NO: 736 - RNA, 25 nt, Artificial Sequence
  Synthetic construct
  misc_feature (1)..(1): 5'-phosphate
  misc_feature (25)..(25): 3'-3 attached terminal deoxyabasic moiety
cugggugccuuuuaaaaggcaccca

SEQ ID NO: 737 - RNA, 24 nt, Artificial Sequence
  Synthetic construct
  misc_feature (1)..(1): 5'-phosphate
  misc_feature (24)..(24): 3'-3 attached terminal deoxyabasic moiety
ugggugccuuuuaaaaggcaccca

SEQ ID NO: 738 - RNA, 25 nt, Artificial Sequence
  Synthetic construct
  misc_feature (1)..(1): 5'-phosphate
  misc_feature (25)..(25): 3'-3 attached terminal deoxyabasic moiety
ugggugccuuuuaaaaggcacccan

SEQ ID NO: 739 - DNA, 26 bp, Artificial Sequence
  Synthetic construct
  misc_feature (1)..(1): 5'-phosphate
  misc_feature (1)..(24): ribonucleotide modified as described
  misc_feature (26)..(26): 3'-3 attached terminal deoxyabasic moiety
ugggugccuuuuaaaaggcacccatt

SEQ ID NO: 740 - RNA, 26 nt, Artificial Sequence
  Synthetic construct
  misc_feature (1)..(1): 5'-phosphate
  misc_feature (26)..(26): 3'-3 attached terminal deoxyabasic moiety
ugcuuuaucauauauaugauaaagca

SEQ ID NO: 741 - RNA, 25 nt, Artificial Sequence
  Synthetic construct
  misc_feature (1)..(1): 5'-phosphate
  misc_feature (25)..(25): 3'-3 attached terminal deoxyabasic moiety
ugcuuuaucauauauaugauaaagc

SEQ ID NO: 742 - RNA, 24 nt, Artificial Sequence
  Synthetic construct
  misc_feature (1)..(1): 5'-phosphate
  misc_feature (24)..(24): 3'-3 attached terminal deoxyabasic moiety
gcuuuaucauauauaugauaaagc

SEQ ID NO: 743 - RNA, 28 nt, Artificial Sequence
  Synthetic construct
  misc_feature (1)..(1): 5'-phosphate
  misc_feature (28)..(28): 3'-3 attached terminal deoxyabasic moiety
aaugcuuuaucauauaugauaaagcauu

SEQ ID NO: 744 - RNA, 29 nt, Artificial Sequence
  Synthetic construct
  misc_feature (1)..(1): 5'-phosphate
  misc_feature (29)..(29): 3'-3 attached terminal deoxyabasic moiety
aaugcuuuaucauauaugauaaagcauun

SEQ ID NO: 745 - DNA, 30 bp, Artificial Sequence
  Synthetic construct
  misc_feature (1)..(1): 5'-phosphate
  misc_feature (1)..(28): ribonucleotide modified as described
  misc_feature (30)..(30): 3'-3 attached terminal deoxyabasic moiety
aaugcuuuaucauauaugauaaagcauutt

SEQ ID NO: 746 - RNA, 27 nt, Artificial Sequence
  Synthetic construct
  misc_feature (1)..(1): 5'-phosphate
  misc_feature (27)..(27): 3'-3 attached terminal deoxyabasic moiety
aaugcuuuaucauauaugauaaagcau

SEQ ID NO: 747 - RNA, 26 nt, Artificial Sequence
  Synthetic construct
  misc_feature (1)..(1): 5'-phosphate
  misc_feature (26)..(26): 3'-3 attached terminal deoxyabasic moiety
augcuuuaucauauaugauaaagcau

SEQ ID NO: 748 - RNA, 26 nt, Artificial Sequence
  Synthetic construct
  misc_feature (1)..(1): 5'-phosphate
  misc_feature (26)..(26): 3'-3 attached terminal deoxyabasic moiety
augcuuuaucauauaugauaaagcau

SEQ ID NO: 749 - DNA, 27 bp, Artificial Sequence
  Synthetic construct
  misc_feature (1)..(1): 5'-phosphate
  misc_feature (1)..(26): ribonucleotide
  misc_feature (27)..(27): 3'-3 attached terminal deoxyabasic moiety
augcuuuaucauauaugauaaagcaut

SEQ ID NO: 750 - RNA, 25 nt, Artificial Sequence
  Synthetic construct
  misc_feature (1)..(1): 5'-phosphate
  misc_feature (25)..(25): 3'-3 attached terminal deoxyabasic moiety
augcuuuaucauauaugauaaagca

SEQ ID NO: 751 - RNA, 28 nt, Artificial Sequence
  Synthetic construct
  misc_feature (1)..(1): 5'-phosphate
  misc_feature (28)..(28): 3'-3 attached terminal deoxyabasic moiety
aaugcuuuaucauauaucuauaagcauu

SEQ ID NO: 752 - RNA, 28 nt, Artificial Sequence
  Synthetic construct
  misc_feature (1)..(1): 5'-phosphate
  misc_feature (28)..(28): 3'-3 attached terminal deoxyabasic moiety
aaugcuuuuaguuauaugauaaagcauu

SEQ ID NO: 753 - RNA, 28 nt, Artificial Sequence
  Synthetic construct
  misc_feature (1)..(1): 5'-phosphate
  misc_feature (28)..(28): 3'-3 attached terminal deoxyabasic moiety
aauccuuaaucuuauuugauaaagcauu

SEQ ID NO: 754 - RNA, 28 nt, Artificial Sequence
  Synthetic construct
  misc_feature (1)..(1): 5'-phosphate
  misc_feature (3)..(3): 2'-deoxy-2'-Fluoro
  misc_feature (5)..(9): 2'-deoxy-2'-Fluoro
  misc_feature (11)..(12): 2'-deoxy-2'-Fluoro
  misc_feature (14)..(14): 2'-deoxy-2'-Fluoro
  misc_feature (16)..(16): 2'-deoxy-2'-Fluoro
  misc_feature (18)..(18): 2'-deoxy-2'-Fluoro
  misc_feature (21)..(21): 2'-deoxy-2'-Fluoro
  misc_feature (26)..(26): 2'-deoxy-2'-Fluoro
  misc_feature (28)..(29): 2'-deoxy-2'-Fluoro
  misc_feature (29)..(29): 3'-3 attached terminal deoxyabasic moiety
aaugcuuuaucauauaugauaaagcauu

SEQ ID NO: 755 - RNA, 28 nt, Artificial Sequence
  Synthetic construct
  misc_feature (1)..(1): 5'-phosphate
  misc_feature (3)..(3): 2'-deoxy-2'-Fluoro
  misc_feature (5)..(8): 2'-deoxy-2'-Fluoro
  misc_feature (10)..(11): 2'-deoxy-2'-Fluoro
  misc_feature (13)..(13): 2'-deoxy-2'-Fluoro
  misc_feature (15)..(15): 2'-deoxy-2'-Fluoro
  misc_feature (17)..(17): 2'-deoxy-2'-Fluoro
  misc_feature (20)..(20): 2'-deoxy-2'-Fluoro
  misc_feature (25)..(25): 2'-deoxy-2'-Fluoro
  misc_feature (27)..(28): 2'-deoxy-2'-Fluoro
  misc_feature (28)..(28): 3'-3 attached terminal deoxyabasic moiety
aaugcuuuaucauauaugauaaagcauu

SEQ ID NO: 756 - RNA, 28 nt, Artificial Sequence
  Synthetic construct
  misc_feature (1)..(1): 5'-phosphate
  misc_feature (28)..(28): 3'-3 attached terminal deoxyabasic moiety
cgagcagggguccuaggaccccugcucg

SEQ ID NO: 757 - RNA, 26 nt, Artificial Sequence
  Synthetic construct
  misc_feature (1)..(1): 5'-phosphate
  misc_feature (26)..(26): 3'-3 attached terminal deoxyabasic moiety
gagcagggguccuaggaccccugcuc

SEQ ID NO: 758 - RNA, 24 nt, Artificial Sequence
  Synthetic construct
  misc_feature (1)..(1): 5'-phosphate
  misc_feature (24)..(24): 3'-3 attached terminal deoxyabasic moiety
agcagggguccuaggaccccugcu

SEQ ID NO: 759 - RNA, 22 nt, Artificial Sequence
  Synthetic construct
  misc_feature (1)..(1): 5'-phosphate
  misc_feature (22)..(22): 3'-3 attached terminal deoxyabasic moiety
gcagggguccuaggaccccugc

SEQ ID NO: 760 - RNA, 26 nt, Artificial Sequence
  Synthetic construct
  misc_feature (1)..(1): 5'-phosphate
  misc_feature (26)..(26): 3'-3 attached terminal deoxyabasic moiety
ccaccacgagucuagacucguggugg

SEQ ID NO: 761 - RNA, 22 nt, Artificial Sequence
  Synthetic construct
  misc_feature (1)..(1): 5'-phosphate
  misc_feature (22)..(22): 3'-3 attached terminal deoxyabasic moiety
accacgagucuagacucguggu

SEQ ID NO: 762 - RNA, 20 nt, Artificial Sequence
  Synthetic construct
  misc_feature (1)..(1): 5'-phosphate
  misc_feature (20)..(20): 3'-3 attached terminal deoxyabasic moiety
ccacgagucuagacucgugg

SEQ ID NO: 763 - RNA, 28 nt, Artificial Sequence
  Synthetic construct
  misc_feature (1)..(1): 5'-phosphate
  misc_feature (28)..(28): 3'-3 attached terminal deoxyabasic moiety
ggugaagcgaagugcacuucgcuucacc

SEQ ID NO: 764 - RNA, 26 nt, Artificial Sequence
  Synthetic construct
  misc_feature (1)..(1): 5'-phosphate
  misc_feature (26)..(26): 3'-3 attached terminal deoxyabasic moiety
gugaagcgaagugcacuucgcuucac

SEQ ID NO: 765 - RNA, 24 nt, Artificial Sequence
  Synthetic construct
  misc_feature (1)..(1): 5'-phosphate
  misc_feature (24)..(24): 3'-3 attached terminal deoxyabasic moiety
ugaagcgaagugcacuucgcuuca

SEQ ID NO: 766 - RNA, 28 nt, Artificial Sequence
  Synthetic construct
  misc_feature (1)..(1): 5'-phosphate
  misc_feature (28)..(28): 3'-3 attached terminal deoxyabasic moiety
ucauacuaacgccauggcguuaguauga

SEQ ID NO: 767 - RNA, 26 nt, Artificial Sequence
  Synthetic construct
  misc_feature (1)..(1): 5'-phosphate
  misc_feature (26)..(26): 3'-3 attached terminal deoxyabasic moiety
cauacuaacgccauggcguuaguaug

SEQ ID NO: 768 - RNA, 24 nt, Artificial Sequence
  Synthetic construct
  misc_feature (1)..(1): 5'-phosphate
  misc_feature (24)..(24): 3'-3 attached terminal deoxyabasic moiety
auacuaacgccauggcguuaguau

SEQ ID NO: 769 - RNA, 22 nt, Artificial Sequence
  Synthetic construct
  misc_feature (1)..(1): 5'-phosphate
  misc_feature (22)..(22): 3'-3 attached terminal deoxyabasic moiety
uacuaacgccauggcguuagua

SEQ ID NO: 770 - RNA, 28 nt, Artificial Sequence
  Synthetic construct
  misc_feature (1)..(1): 5'-phosphate
  misc_feature (28)..(28): 3'-3 attached terminal deoxyabasic moiety
acuauggcucucccgggagagccauagu

SEQ ID NO: 771 - RNA, 26 nt, Artificial Sequence
  Synthetic construct
  misc_feature (1)..(1): 5'-phosphate
  misc_feature (26)..(26): 3'-3 attached terminal deoxyabasic moiety
cuauggcucucccgggagagccauag

SEQ ID NO: 772 - RNA, 24 nt, Artificial Sequence
  Synthetic construct
  misc_feature (1)..(1): 5'-phosphate
  misc_feature (24)..(24): 3'-3 attached terminal deoxyabasic moiety
uauggcucucccgggagagccaua

SEQ ID NO: 773 - RNA, 22 nt, Artificial Sequence
  Synthetic construct
  misc_feature (1)..(1): 5'-phosphate
  misc_feature (22)..(22): 3'-3 attached terminal deoxyabasic moiety
auggcucucccgggagagccau

SEQ ID NO: 774 - RNA, 20 nt, Artificial Sequence
  Synthetic construct
  misc_feature (1)..(1): 5'-phosphate
  misc_feature (20)..(20): 3'-3 attached terminal deoxyabasic moiety
uggcucucccgggagagcca

SEQ ID NO: 775 - RNA, 28 nt, Artificial Sequence
  Synthetic construct
  misc_feature (1)..(1): 5'-phosphate
  misc_feature (28)..(28): 3'-3 attached terminal deoxyabasic moiety
ccgguguacucaccggugaguacaccgg

SEQ ID NO: 776 - RNA, 26 nt, Artificial Sequence
  Synthetic construct
  misc_feature (1)..(1): 5'-phosphate
  misc_feature (26)..(26): 3'-3 attached terminal deoxyabasic moiety
cgguguacucaccggugaguacaccg

SEQ ID NO: 777 - RNA, 24 nt, Artificial Sequence
  Synthetic construct
  misc_feature (1)..(1): 5'-phosphate
  misc_feature (24)..(24): 3'-3 attached terminal deoxyabasic moiety
gguguacucaccggugaguacacc

SEQ ID NO: 778 - RNA, 28 nt, Artificial Sequence
  Synthetic construct
  misc_feature (1)..(1): 5'-phosphate
  misc_feature (28)..(28): 3'-3 attached terminal deoxyabasic moiety
cuacgagaccucccgggaggucucguag

SEQ ID NO: 779 - RNA, 26 nt, Artificial Sequence
  Synthetic construct
  misc_feature (1)..(1): 5'-phosphate
  misc_feature (26)..(26): 3'-3 attached terminal deoxyabasic moiety
uacgagaccucccgggaggucucgua

SEQ ID NO: 780 - RNA, 24 nt, Artificial Sequence
  Synthetic construct
  misc_feature (1)..(1): 5'-phosphate
  misc_feature (24)..(24): 3'-3 attached terminal deoxyabasic moiety
acgagaccucccgggaggucucgu

SEQ ID NO: 781 - DNA, 21 bp, Artificial Sequence
  Synthetic construct
  misc_feature (1)..(19): ribonucleotide
cucacugccacucuaauugtt

SEQ ID NO: 782 - DNA, 21 bp, Artificial Sequence
  Synthetic construct
  misc_feature (1)..(19): ribonucleotide
ucacugccacucuaauugutt

SEQ ID NO: 783 - DNA, 21 bp, Artificial Sequence
  Synthetic construct
  misc_feature (1)..(19): ribonucleotide
cacugccacucuaauuguctt

SEQ ID NO: 784 - DNA, 21 bp, Artificial Sequence
  Synthetic construct
  misc_feature (1)..(19): ribonucleotide
gaccccgucucuauaccaatt

SEQ ID NO: 785 - DNA, 21 bp, Artificial Sequence
  Synthetic construct
  misc_feature (1)..(19): ribonucleotide
agaguggcagugagcaaagtt

SEQ ID NO: 786 - DNA, 21 bp, Artificial Sequence
  Synthetic construct
  misc_feature (1)..(19): ribonucleotide
agagacggggucagagagatt

SEQ ID NO: 787 - DNA, 21 bp, Artificial Sequence
  Synthetic construct
  misc_feature (1)..(19): ribonucleotide
agcauuuguuuguacaagatt

SEQ ID NO: 788 - DNA, 21 bp, Artificial Sequence
  Synthetic construct
  misc_feature (1)..(19): ribonucleotide
gcacuucgcuucaccucugtt

SEQ ID NO: 789 - DNA, 21 bp, Artificial Sequence
  Synthetic construct
  misc_feature (1)..(19): ribonucleotide
caauuagaguggcagugagtt

SEQ ID NO: 790 - DNA, 21 bp, Artificial Sequence
  Synthetic construct
  misc_feature (1)..(19): ribonucleotide
acaauuagaguggcagugatt

SEQ ID NO: 791 - DNA, 21 bp, Artificial Sequence
  Synthetic construct
  misc_feature (1)..(19): ribonucleotide
gacaauuagaguggcagugtt

SEQ ID NO: 792 - DNA, 21 bp, Artificial Sequence
  Synthetic construct
  misc_feature (1)..(19): ribonucleotide
uugguauagagacgggguctt

SEQ ID NO: 793 - DNA, 21 bp, Artificial Sequence
  Synthetic construct
  misc_feature (1)..(19): ribonucleotide
cuuugcucacugccacucutt

SEQ ID NO: 794 - DNA, 21 bp, Artificial Sequence
  Synthetic construct
  misc_feature (1)..(19): ribonucleotide
ucucucugaccccgucucutt

SEQ ID NO: 795 - DNA, 21 bp, Artificial Sequence
  Synthetic construct
  misc_feature (1)..(19): ribonucleotide
ucuuguacaaacaaaugcutt

SEQ ID NO: 796 - DNA, 21 bp, Artificial Sequence
  Synthetic construct
  misc_feature (1)..(19): ribonucleotide
cagaggugaagcgaagugctt

SEQ ID NO: 797 - DNA, 26 bp, Artificial Sequence
  Synthetic construct
  misc_feature (1)..(24): ribonucleotide
caauuagaguggcagugagcaaagtt

SEQ ID NO: 798 - DNA, 27 bp, Artificial Sequence
  Synthetic construct
  misc_feature (1)..(25): ribonucleotide
acaauuagaguggcagugagcaaagtt

SEQ ID NO: 799 - DNA, 28 bp, Artificial Sequence
  Synthetic construct
  misc_feature (1)..(26): ribonucleotide
gacaauuagaguggcagugagcaaagtt

SEQ ID NO: 800 - DNA, 35 bp, Artificial Sequence
  Synthetic construct
  misc_feature (1)..(33): ribonucleotide
ugugccagcaguccagcauuuguuuguacaagatt

SEQ ID NO: 801 - DNA, 28 bp, Artificial Sequence
  Synthetic construct
  misc_feature (1)..(26): ribonucleotide
uugguauagagacggggucagagagatt

SEQ ID NO: 802 - DNA, 26 bp, Artificial Sequence
  Synthetic construct
  misc_feature (1)..(24): ribonucleotide
cuuugcucacugccacucuaauugtt

SEQ ID NO: 803 - DNA, 27 bp, Artificial Sequence
  Synthetic construct
  misc_feature (1)..(25): ribonucleotide
cuuugcucacugccacucuaauugutt

SEQ ID NO: 804 - DNA, 28 bp, Artificial Sequence
  Synthetic construct
  misc_feature (1)..(26): ribonucleotide
cuuugcucacugccacucuaauuguctt

SEQ ID NO: 805 - DNA, 35 bp, Artificial Sequence
  Synthetic construct
  misc_feature (1)..(33): ribonucleotide
ucuuguacaaacaaaugcuggacugcuggcacatt

SEQ ID NO: 806 - DNA, 28 bp, Artificial Sequence
  Synthetic construct
  misc_feature (1)..(26): ribonucleotide
ucucucugaccccgucucuauaccaatt

SEQ ID NO: 807 - DNA, 40 bp, Artificial Sequence
  Synthetic construct
  misc_feature (1)..(38): ribonucleotide
ugugccagcaguccagcauugugaaugcagaccaaagatt

SEQ ID NO: 808 - DNA, 40 bp, Artificial Sequence
  Synthetic construct
  misc_feature (1)..(38): ribonucleotide
ucuuuggucugcauucacaaugcuggacugcuggcacatt

SEQ ID NO: 809 - DNA, 36 bp, Artificial Sequence
  Synthetic construct
  misc_feature (1)..(34): ribonucleotide
ugugccagcaguccagcugaaugcagaccaaagatt

SEQ ID NO: 810 - DNA, 36 bp, Artificial Sequence
  Synthetic construct
  misc_feature (1)..(34): ribonucleotide
ucuuuggucugcauucagcuggacugcuggcacatt

SEQ ID NO: 811 - DNA, 40 bp, Artificial Sequence
  Synthetic construct
  misc_feature (1)..(38): ribonucleotide
ugugccagcaguccagcaugaaugcagaccaaagaaagtt

SEQ ID NO: 812 - DNA, 40 bp, Artificial Sequence
  Synthetic construct
  misc_feature (1)..(38): ribonucleotide
cuuucuuuggucugcauucaugcuggacugcuggcacatt

SEQ ID NO: 813 - DNA, 40 bp, Artificial Sequence
  Synthetic construct
  misc_feature (1)..(38): ribonucleotide
ugugccagcaguccagcaugugaaugcagaccaaagaatt

SEQ ID NO: 814 - DNA, 40 bp, Artificial Sequence
  Synthetic construct
  misc_feature (1)..(38): ribonucleotide
uucuuuggucugcauucacaugcuggacugcuggcacatt

SEQ ID NO: 815 - DNA, 40 bp, Artificial Sequence
  Synthetic construct
  misc_feature (1)..(38): ribonucleotide
cagaggugaagcgaagugcggauguggugauucaggautt

SEQ ID NO: 816 - DNA, 40 bp, Artificial Sequence
  Synthetic construct
  misc_feature (1)..(38): ribonucleotide
auccugaaucaccacauccgcacuucgcuucaccucugtt

SEQ ID NO: 817 - DNA, 40 bp, Artificial Sequence
  Synthetic construct
  misc_feature (1)..(38): ribonucleotide
agaaaauugagagaaguccggauguggugauucaggautt

SEQ ID NO: 818 - DNA, 40 bp, Artificial Sequence
  Synthetic construct
  misc_feature (1)..(38): ribonucleotide
auccugaaucaccacauccggacuucucucaauuuucutt

SEQ ID NO: 819 - RNA, 32 nt, Artificial Sequence
  Synthetic construct
agaaaauugagagaaguuucucucaauuuucu

SEQ ID NO: 820 - RNA, 32 nt, Artificial Sequence
  Synthetic construct
agaaaauugagagaagcuucucucaauuuucu

SEQ ID NO: 821 - RNA, 30 nt, Artificial Sequence
  Synthetic construct
agaaaauugagagaauucucucaauuuucu

SEQ ID NO: 822 - RNA, 31 nt, Artificial Sequence
  Synthetic construct
agaaaauugagagaaguuucucucaauuuuc

SEQ ID NO: 823 - RNA, 31 nt, Artificial Sequence
  Synthetic construct
agaaaauugagagaagcuucucucaauuuuc

SEQ ID NO: 824 - RNA, 29 nt, Artificial Sequence
  Synthetic construct
agaaaauugagagaauucucucaauuuuc

SEQ ID NO: 825 - RNA, 28 nt, Artificial Sequence
  Synthetic construct
agaaaauugagagaauucucucaauuuu

SEQ ID NO: 826 - RNA, 27 nt, Artificial Sequence
  Synthetic construct
agaaaauugagagaauucucucaauuu

SEQ ID NO: 827 - RNA, 28 nt, Artificial Sequence
  Synthetic construct
ggugaagcgaagugcacuucgcuucacc

SEQ ID NO: 828 - DNA, 30 bp, Artificial Sequence
  Synthetic construct
  misc_feature (1)..(28): ribonucleotide
ggugaagcgaagugcacuucgcuucacctt

SEQ ID NO: 829 - DNA, 29 bp, Artificial Sequence
  Synthetic construct
  misc_feature (1)..(28): ribonucleotide
ggugaagcgaagugcacuucgcuucacct

SEQ ID NO: 830 - RNA, 28 nt, Artificial Sequence
  Synthetic construct
ggugaagcgaagugcacuucgcuucacu

SEQ ID NO: 831 - DNA, 30 bp, Artificial Sequence
  Synthetic construct
  misc_feature (1)..(28): ribonucleotide
ggugaagcgaagugcacuucgcuucacutt

SEQ ID NO: 832 - RNA, 28 nt, Artificial Sequence
  Synthetic construct
ggugaagcgaagugcacuucgcuucauu

SEQ ID NO: 833 - RNA, 32 nt, Artificial Sequence
  Synthetic construct
gaggugaagcgaagugcacuucgcuucaccuc

SEQ ID NO: 834 - RNA, 30 nt, Artificial Sequence
  Synthetic construct
aggugaagcgaagugcacuucgcuucaccu

SEQ ID NO: 835 - RNA, 26 nt, Artificial Sequence
  Synthetic construct
ccaccacgagucuagacucguggugg

SEQ ID NO: 836 - RNA, 26 nt, Artificial Sequence
  Synthetic construct
ccaccacgagucuagacucgugguuu

SEQ ID NO: 837 - RNA, 24 nt, Artificial Sequence
  Synthetic construct
caccacgagucuagacucguggug

SEQ ID NO: 838 - DNA, 26 bp, Artificial Sequence
  Synthetic construct
  misc_feature (1)..(24): ribonucleotide
caccacgagucuagacucguggugtt

SEQ ID NO: 839 - RNA, 24 nt, Artificial Sequence
  Synthetic construct
caccacgagucuagacucgugguu

SEQ ID NO: 840 - DNA, 26 bp, Artificial Sequence
  Synthetic construct
  misc_feature (1)..(24): ribonucleotide
caccacgagucuagacucgugguutt

SEQ ID NO: 841 - RNA, 22 nt, Artificial Sequence
  Synthetic construct
accacgagucuagacucguggu

SEQ ID NO: 842 - DNA, 24 bp, Artificial Sequence
  Synthetic construct
  misc_feature (1)..(22): ribonucleotide
accacgagucuagacucguggutt

SEQ ID NO: 843 - RNA, 30 nt, Artificial Sequence
  Synthetic construct
aguucuauuuuauugcaauaaaauagaacu

SEQ ID NO: 844 - RNA, 26 nt, Artificial Sequence
  Synthetic construct
uucuauuuuauugcaauaaaauagaa

SEQ ID NO: 845 - RNA, 30 nt, Artificial Sequence
  Synthetic construct
cgaacguucuucucuagagaagaacguucg

SEQ ID NO: 846 - RNA, 26 nt, Artificial Sequence
  Synthetic construct
aacguucuucucuagagaagaacguu

SEQ ID NO: 847 - RNA, 28 nt, Artificial Sequence
  Synthetic construct
aacguucuucucuagaggaaagaacguu

SEQ ID NO: 848 - RNA, 30 nt, Artificial Sequence
  Synthetic construct
aguugguaaucuucaugaagauuaccaacu

SEQ ID NO: 849 - RNA, 30 nt, Artificial Sequence
  Synthetic construct
aaacccaggagcagaucugcuccuggguuu

SEQ ID NO: 850 - RNA, 32 nt, Artificial Sequence
  Synthetic construct
uaacgccgucgcccccgggggcgacggcguua

SEQ ID NO: 851 - RNA, 32 nt, Artificial Sequence
  Synthetic construct
uaaaauugucuuuuguacaaaagacaauuuua

SEQ ID NO: 852 - RNA, 30 nt, Artificial Sequence
  Synthetic construct
aaauugucuuuuguacagaagacaauuuua

SEQ ID NO: 853 - RNA, 26 nt, Artificial Sequence
  Synthetic construct
auuacauagaaauauuucuauguaau

SEQ ID NO: 854 - RNA, 28 nt, Artificial Sequence
  Synthetic construct
aaacacugcuuugaucaaagcaguguuu

SEQ ID NO: 855 - RNA, 28 nt, Artificial Sequence
  Synthetic construct
ucuacucagaauagcuauucugaguaga

SEQ ID NO: 856 - RNA, 28 nt, Artificial Sequence
  Synthetic construct
aaauauuucucuaauuagagaaauauuu

SEQ ID NO: 857 - RNA, 28 nt, Artificial Sequence
  Synthetic construct
uacacauacaauguacauuguaugugua

SEQ ID NO: 858 - RNA, 30 nt, Artificial Sequence
  Synthetic construct
uguggacagagcaagcuugcucuguccaca

SEQ ID NO: 859 - RNA, 30 nt, Artificial Sequence
  Synthetic construct
aaccaaggaaacacuaguguuuccuugguu

SEQ ID NO: 860 - RNA, 30 nt, Artificial Sequence
  Synthetic construct
ugugaaggagcugugcacagcuccuucaca

SEQ ID NO: 861 - RNA, 30 nt, Artificial Sequence
  Synthetic construct
caacguggcacugaauucagugccacguug

SEQ ID NO: 862 - RNA, 28 nt, Artificial Sequence
  Synthetic construct
aacguggcacugaauucagugccacguu

SEQ ID NO: 863 - RNA, 30 nt, Artificial Sequence
  Synthetic construct
acauugaugaaaucaugauuucaucaaugu

SEQ ID NO: 864 - RNA, 30 nt, Artificial Sequence
  Synthetic construct
aaacccauuuccuugcaaggaaauggguuu

SEQ ID NO: 865 - DNA, 41 bp, Artificial Sequence
  Synthetic construct
  misc_feature (1)..(39): ribonucleotide
ugucucagaucugagcaccaggacuucucucaauuuucutt

SEQ ID NO: 866 - DNA, 39 bp, Artificial Sequence
  Synthetic construct
  misc_feature (1)..(37): ribonucleotide
ucucagaucugagcaccaggacuucucucaauuuucutt

SEQ ID NO: 867 - DNA, 37 bp, Artificial Sequence
  Synthetic construct
  misc_feature (1)..(35): ribonucleotide
ucagaucugagcaccaggacuucucucaauuuucutt

SEQ ID NO: 868 - DNA, 35 bp, Artificial Sequence
  Synthetic construct
  misc_feature (1)..(33): ribonucleotide
agaucugagcaccaggacuucucucaauuuucutt

SEQ ID NO: 869 - DNA, 34 bp, Artificial Sequence
  Synthetic construct
  misc_feature (1)..(32): ribonucleotide
gaucugagcaccaggacuucucucaauuuucutt

SEQ ID NO: 870 - DNA, 33 bp, Artificial Sequence
  Synthetic construct
  misc_feature (1)..(31): ribonucleotide
aucugagcaccaggacuucucucaauuuucutt

SEQ ID NO: 871 - DNA, 32 bp, Artificial Sequence
  Synthetic construct
  misc_feature (1)..(30): ribonucleotide
ucugagcaccaggacuucucucaauuuucutt

SEQ ID NO: 872 - DNA, 31 bp, Artificial Sequence
  Synthetic construct
  misc_feature (1)..(29): ribonucleotide
cugagcaccaggacuucucucaauuuucutt

SEQ ID NO: 873 - DNA, 30 bp, Artificial Sequence
  Synthetic construct
  misc_feature (1)..(28): ribonucleotide
ugagcaccaggacuucucucaauuuucutt

SEQ ID NO: 874 - DNA, 29 bp, Artificial Sequence
  Synthetic construct
  misc_feature (1)..(27): ribonucleotide
gagcaccaggacuucucucaauuuucutt

SEQ ID NO: 875 - DNA, 28 bp, Artificial Sequence
  Synthetic construct
  misc_feature (1)..(26): ribonucleotide
agcaccaggacuucucucaauuuucutt

SEQ ID NO: 876 - DNA, 27 bp, Artificial Sequence
  Synthetic construct
  misc_feature (1)..(25): ribonucleotide
gcaccaggacuucucucaauuuucutt

SEQ ID NO: 877 - DNA, 26 bp, Artificial Sequence
  Synthetic construct
  misc_feature (1)..(24): ribonucleotide
caccaggacuucucucaauuuucutt

SEQ ID NO: 878 - DNA, 25 bp, Artificial Sequence
  Synthetic construct
  misc_feature (1)..(23): ribonucleotide
accaggacuucucucaauuuucutt

SEQ ID NO: 879 - DNA, 24 bp, Artificial Sequence
  Synthetic construct
  misc_feature (1)..(22): ribonucleotide
ccaggacuucucucaauuuucutt

SEQ ID NO: 880 - DNA, 23 bp, Artificial Sequence
  Synthetic construct
  misc_feature (1)..(21): ribonucleotide
caggacuucucucaauuuucutt

SEQ ID NO: 881 - DNA, 22 bp, Artificial Sequence
  Synthetic construct
  misc_feature (1)..(20): ribonucleotide
aggacuucucucaauuuucutt

SEQ ID NO: 882 - DNA, 41 bp, Artificial Sequence
  Synthetic construct
  misc_feature (1)..(39): ribonucleotide
agaaaauugagagaaguccuggugcucagaucugagacatt

SEQ ID NO: 883 - DNA, 39 bp, Artificial Sequence
  Synthetic construct
  misc_feature (1)..(37): ribonucleotide
agaaaauugagagaaguccuggugcucagaucugagatt

SEQ ID NO: 884 - DNA, 37 bp, Artificial Sequence
  Synthetic construct
  misc_feature (1)..(35): ribonucleotide
agaaaauugagagaaguccuggugcucagaucugatt

SEQ ID NO: 885 - DNA, 35 bp, Artificial Sequence
  Synthetic construct
  misc_feature (1)..(33): ribonucleotide
agaaaauugagagaaguccuggugcucagaucutt

SEQ ID NO: 886 - DNA, 34 bp, Artificial Sequence
  Synthetic construct
  misc_feature (1)..(32): ribonucleotide
agaaaauugagagaaguccuggugcucagauctt

SEQ ID NO: 887 - DNA, 33 bp, Artificial Sequence
  Synthetic construct
  misc_feature (1)..(31): ribonucleotide
agaaaauugagagaaguccuggugcucagautt

SEQ ID NO: 888 - DNA, 32 bp, Artificial Sequence
  Synthetic construct
  misc_feature (1)..(30): ribonucleotide
agaaaauugagagaaguccuggugcucagatt

SEQ ID NO: 889 - DNA, 31 bp, Artificial Sequence
  Synthetic construct
  misc_feature (1)..(29): ribonucleotide
agaaaauugagagaaguccuggugcucagtt

SEQ ID NO: 890 - DNA, 30 bp, Artificial Sequence
  Synthetic construct
  misc_feature (1)..(28): ribonucleotide
agaaaauugagagaaguccuggugcucatt

SEQ ID NO: 891 - DNA, 29 bp, Artificial Sequence
  Synthetic construct
  misc_feature (1)..(27): ribonucleotide
agaaaauugagagaaguccuggugcuctt

SEQ ID NO: 892 - DNA, 28 bp, Artificial Sequence
  Synthetic construct
  misc_feature (1)..(26): ribonucleotide modified as described
agaaaauugagagaaguccuggugcutt

SEQ ID NO: 893 - DNA, 27 bp, Artificial Sequence
  Synthetic construct
  misc_feature (1)..(25): ribonucleotide
agaaaauugagagaaguccuggugctt

SEQ ID NO: 894 - DNA, 26 bp, Artificial Sequence
  Synthetic construct
  misc_feature (1)..(24): ribonucleotide
agaaaauugagagaaguccuggugtt

SEQ ID NO: 895 - DNA, 25 bp, Artificial Sequence
  Synthetic construct
  misc_feature (1)..(23): ribonucleotide
agaaaauugagagaaguccuggutt

SEQ ID NO: 896 - DNA, 24 bp, Artificial Sequence
  Synthetic construct
  misc_feature (1)..(22): ribonucleotide
agaaaauugagagaaguccuggtt

SEQ ID NO: 897 - DNA, 23 bp, Artificial Sequence
  Synthetic construct
  misc_feature (1)..(21): ribonucleotide
agaaaauugagagaaguccugtt

SEQ ID NO: 898 - DNA, 22 bp, Artificial Sequence
  Synthetic construct
  misc_feature (1)..(20): ribonucleotide
agaaaauugagagaaguccutt

SEQ ID NO: 899 - RNA, 38 nt, Artificial Sequence
  Synthetic construct
ggucuacgagaccucccggccgggaggucucguagacc

SEQ ID NO: 900 - DNA, 40 bp, Artificial Sequence
  Synthetic construct
  misc_feature (1)..(38): ribonucleotide
ggucuacgagaccucccggccgggaggucucguagacctt

SEQ ID NO: 901 - RNA, 36 nt, Artificial Sequence
  Synthetic construct
ggucuacgagaccucccgcgggaggucucguagacc

SEQ ID NO: 902 - DNA, 38 bp, Artificial Sequence
  Synthetic construct
  misc_feature (1)..(36): ribonucleotide
ggucuacgagaccucccgcgggaggucucguagacctt

SEQ ID NO: 903 - RNA, 34 nt, Artificial Sequence
  Synthetic construct
ggucuacgagaccucccgggaggucucguagacc

SEQ ID NO: 904 - DNA, 36 bp, Artificial Sequence
  Synthetic construct
  misc_feature (1)..(34): ribonucleotide
ggucuacgagaccucccgggaggucucguagacctt

SEQ ID NO: 905 - RNA, 32 nt, Artificial Sequence
  Synthetic construct
ggucuacgagaccuccggaggucucguagacc

SEQ ID NO: 906 - DNA, 34 bp, Artificial Sequence
  Synthetic construct
  misc_feature (1)..(32): ribonucleotide
ggucuacgagaccuccggaggucucguagacctt

SEQ ID NO: 907 - RNA, 32 nt, Artificial Sequence
  Synthetic construct
gucuacgagaccucccgggaggucucguagac

SEQ ID NO: 908 - DNA, 34 bp, Artificial Sequence
  Synthetic construct
  misc_feature (1)..(32): ribonucleotide
gucuacgagaccucccgggaggucucguagactt

SEQ ID NO: 909 - RNA, 30 nt, Artificial Sequence
  Synthetic construct
ucuacgagaccucccgggaggucucguaga

SEQ ID NO: 910 - DNA, 32 bp, Artificial Sequence
  Synthetic construct
  misc_feature (1)..(30): ribonucleotide
ucuacgagaccucccgggaggucucguagatt

SEQ ID NO: 911 - RNA, 28 nt, Artificial Sequence
  Synthetic construct
cuacgagaccucccgggaggucucguag

SEQ ID NO: 912 - DNA, 30 bp, Artificial Sequence
  Synthetic construct
  misc_feature (1)..(28): ribonucleotide
cuacgagaccucccgggaggucucguagtt

SEQ ID NO: 913 - RNA, 30 nt, Artificial Sequence
  Synthetic construct
ggucuacgagaccuccaggucucguagacc

SEQ ID NO: 914 - DNA, 32 bp, Artificial Sequence
  Synthetic construct
  misc_feature (1)..(30): ribonucleotide
ggucuacgagaccuccaggucucguagacctt

SEQ ID NO: 915 - RNA, 30 nt, Artificial Sequence
  Synthetic construct
ggucuacgagaccucgaggucucguagacc

SEQ ID NO: 916 - DNA, 32 bp, Artificial Sequence
  Synthetic construct
  misc_feature (1)..(30): ribonucleotide
ggucuacgagaccucgaggucucguagacctt

SEQ ID NO: 917 - RNA, 30 nt, Artificial Sequence
  Synthetic construct
ggucuacgagaccugcaggucucguagacc

SEQ ID NO: 918 - DNA, 32 bp, Artificial Sequence
  Synthetic construct
  misc_feature (1)..(30): ribonucleotide
ggucuacgagaccugcaggucucguagacctt

SEQ ID NO: 919 - DNA, 40 bp, Artificial Sequence
  Synthetic construct
  misc_feature (1)..(38): ribonucleotide
gacuaucccacgaacgcucgagcguucgugggauaguctt

SEQ ID NO: 920 - RNA, 38 nt, Artificial Sequence
  Synthetic construct
gacuaucccacgaacgcucgagcguucgugggauaguc

SEQ ID NO: 921 - DNA, 34 bp, Artificial Sequence
  Synthetic construct
  misc_feature (1)..(32): ribonucleotide
gacuaucccacgaacgcguucgugggauaguctt

SEQ ID NO: 922 - RNA, 32 nt, Artificial Sequence
  Synthetic construct
gacuaucccacgaacgcguucgugggauaguc

SEQ ID NO: 923 - DNA, 32 bp, Artificial Sequence
  Synthetic construct
  misc_feature (1)..(30): ribonucleotide
gacuaucccacgaacguucgugggauaguctt

SEQ ID NO: 924 - RNA, 30 nt, Artificial Sequence
  Synthetic construct
gacuaucccacgaacguucgugggauaguc

SEQ ID NO: 925 - DNA, 30 bp, Artificial Sequence
  Synthetic construct
  misc_feature (1)..(28): ribonucleotide
acuaucccacgaacguucgugggauagutt

SEQ ID NO: 926 - RNA, 24 nt, Artificial Sequence
  Synthetic construct
acuaucccacgaacguucguggga

SEQ ID NO: 927 - RNA, 32 nt, Artificial Sequence
  Synthetic construct
uaucucuucauagccuuauugguaugggcaaa

SEQ ID NO: 928 - RNA, 35 nt, Artificial Sequence
  Synthetic construct
ucguccacaaacacaacucuucuuauuuauggcga

SEQ ID NO: 929 - RNA, 33 nt, Artificial Sequence
  Synthetic construct
caacgaugaagaaguguucuugauucauuuauu

SEQ ID NO: 930 - RNA, 33 nt, Artificial Sequence
  Synthetic construct
acgcgcccaacaccggcauuucauuauagcuau

SEQ ID NO: 931 - RNA, 38 nt, Artificial Sequence
  Synthetic construct
uaucucuucauagccuuauuguucuugauucauuuauu

SEQ ID NO: 932 - RNA, 34 nt, Artificial Sequence
  Synthetic construct
uaucucuucauagccuuuucuugauucauuuauu

SEQ ID NO: 933 - RNA, 38 nt, Artificial Sequence
  Synthetic construct
uaucucuucauagccuuauggcauuucauuauagcuau

SEQ ID NO: 934 - RNA, 38 nt, Artificial Sequence
  Synthetic construct
ucguccacaaacacaacucuguucuugauucauuuauu

SEQ ID NO: 935 - RNA, 34 nt, Artificial Sequence
  Synthetic construct
ucguccacaaacacaacuucuugauucauuuauu

SEQ ID NO: 936 - RNA, 38 nt, Artificial Sequence
  Synthetic construct
ucguccacaaacacaacucggcauuucauuauagcuau

SEQ ID NO: 937 - RNA, 32 nt, Artificial Sequence
  Synthetic construct
uuugcccauaccaauaaggcuaugaagagaua

SEQ ID NO: 938 - RNA, 35 nt, Artificial Sequence
  Synthetic construct
ucgccauaaauaagaagaguuguguuuguggacga

SEQ ID NO: 939 - RNA, 33 nt, Artificial Sequence
  Synthetic construct
aauaaaugaaucaagaacacuucuucaucguug

SEQ ID NO: 940 - RNA, 33 nt, Artificial Sequence
  Synthetic construct
auagcuauaaugaaaugccgguguugggcgcgu

SEQ ID NO: 941 - RNA, 38 nt, Artificial Sequence
  Synthetic construct
aauaaaugaaucaagaacaauaaggcuaugaagagaua

SEQ ID NO: 942 - RNA, 34 nt, Artificial Sequence
  Synthetic construct
aauaaaugaaucaagaaaaggcuaugaagagaua

SEQ ID NO: 943 - RNA, 38 nt, Artificial Sequence
  Synthetic construct
auagcuauaaugaaaugccauaaggcuaugaagagaua

SEQ ID NO: 944 - RNA, 38 nt, Artificial Sequence
  Synthetic construct
aauaaaugaaucaagaacagaguuguguuuguggacga

SEQ ID NO: 945 - RNA, 34 nt, Artificial Sequence
  Synthetic construct
aauaaaugaaucaagaaguuguguuuguggacga

SEQ ID NO: 946 - RNA, 38 nt, Artificial Sequence
  Synthetic construct
auagcuauaaugaaaugccgaguuguguuuguggacga

SEQ ID NO: 947 - DNA, 21 bp, Artificial Sequence
  Synthetic construct
  misc_feature (1)..(19): ribonucleotide
ggauguggugauucaggautt

SEQ ID NO: 948 - DNA, 21 bp, Artificial Sequence
  Synthetic construct
  misc_feature (1)..(19): ribonucleotide
ccucuucuuuuuucuuaaatt

SEQ ID NO: 949 - DNA, 21 bp, Artificial Sequence
  Synthetic construct
  misc_feature (1)..(19): ribonucleotide
cucuucuuuuuucuuaaactt

SEQ ID NO: 950 - DNA, 21 bp, Artificial Sequence
  Synthetic construct
  misc_feature (1)..(19): ribonucleotide
ucuucuuuuuucuuaaacatt

SEQ ID NO: 951 - DNA, 21 bp, Artificial Sequence
  Synthetic construct
  misc_feature (1)..(19): ribonucleotide
uucuuuuuucuuaaacauutt

SEQ ID NO: 952 - DNA, 21 bp, Artificial Sequence
  Synthetic construct
  misc_feature (1)..(19): ribonucleotide
uuuuuucuuaaacauuuuutt

SEQ ID NO: 953 - DNA, 21 bp, Artificial Sequence
  Synthetic construct
  misc_feature (1)..(19): ribonucleotide
uuuucuuaaacauuuuuuutt

SEQ ID NO: 954 - DNA, 21 bp, Artificial Sequence
  Synthetic construct
  misc_feature (1)..(19): ribonucleotide
uuucuuaaacauuuuuuuutt

SEQ ID NO: 955 - DNA, 21 bp, Artificial Sequence
  Synthetic construct
  misc_feature (1)..(19): ribonucleotide
cauuuuuuuuuaaaacugutt

SEQ ID NO: 956 - DNA, 21 bp, Artificial Sequence
  Synthetic construct
  misc_feature (1)..(19): ribonucleotide
uuuuuaaaacuguauuguutt

SEQ ID NO: 957 - DNA, 21 bp, Artificial Sequence
  Synthetic construct
  misc_feature (1)..(19): ribonucleotide
uuuuaaaacuguauuguuutt

SEQ ID NO: 958 - DNA, 21 bp, Artificial Sequence
  Synthetic construct
  misc_feature (1)..(19): ribonucleotide
aaaacuguauuguuucucgtt

SEQ ID NO: 959 - DNA, 21 bp, Artificial Sequence
  Synthetic construct
  misc_feature (1)..(19): ribonucleotide
uguuucucguuuuaauuuatt

SEQ ID NO: 960 - DNA, 21 bp, Artificial Sequence
  Synthetic construct
  misc_feature (1)..(19): ribonucleotide
auuuuugcuugccauuccctt

SEQ ID NO: 961 - DNA, 21 bp, Artificial Sequence
  Synthetic construct
  misc_feature (1)..(19): ribonucleotide
cccacuugaaucgggccgatt

SEQ ID NO: 962 - DNA, 21 bp, Artificial Sequence
  Synthetic construct
  misc_feature (1)..(19): ribonucleotide
ccacuugaaucgggccgactt

SEQ ID NO: 963 - DNA, 21 bp, Artificial Sequence
  Synthetic construct
  misc_feature (1)..(19): ribonucleotide
ccagagagaagucgaggaatt

SEQ ID NO: 964 - DNA, 21 bp, Artificial Sequence
  Synthetic construct
  misc_feature (1)..(19): ribonucleotide
cagagagaagucgaggaagtt

SEQ ID NO: 965 - DNA, 21 bp, Artificial Sequence
  Synthetic construct
  misc_feature (1)..(19): ribonucleotide
cagagagagcgcgcgggcgtt

SEQ ID NO: 966 - DNA, 21 bp, Artificial Sequence
  Synthetic construct
  misc_feature (1)..(19): ribonucleotide
agcugaccagucgcgcugatt

SEQ ID NO: 967 - DNA, 21 bp, Artificial Sequence
  Synthetic construct
  misc_feature (1)..(19): ribonucleotide
ccggagcccgcgcccggagtt

SEQ ID NO: 968 - DNA, 21 bp, Artificial Sequence
  Synthetic construct
  misc_feature (1)..(19): ribonucleotide
cggagcccgcgcccggaggtt

SEQ ID NO: 969 - DNA, 21 bp, Artificial Sequence
  Synthetic construct
  misc_feature (1)..(19): ribonucleotide
ggagcccgcgcccggaggctt

SEQ ID NO: 970 - DNA, 21 bp, Artificial Sequence
  Synthetic construct
  misc_feature (1)..(19): ribonucleotide
cugaaacuuuucguccaactt

SEQ ID NO: 971 - DNA, 21 bp, Artificial Sequence
  Synthetic construct
  misc_feature (1)..(19): ribonucleotide
ugaaacuuuucguccaacutt

SEQ ID NO: 972 - DNA, 21 bp, Artificial Sequence
  Synthetic construct
  misc_feature (1)..(19): ribonucleotide
gaaacuuuucguccaacuutt

SEQ ID NO: 973 - DNA, 21 bp, Artificial Sequence
  Synthetic construct
  misc_feature (1)..(19): ribonucleotide
cuuuucguccaacuucuggtt

SEQ ID NO: 974 - DNA, 21 bp, Artificial Sequence
  Synthetic construct
  misc_feature (1)..(19): ribonucleotide
ucugggcuguucucgcuuctt

SEQ ID NO: 975 - DNA, 21 bp, Artificial Sequence
  Synthetic construct
  misc_feature (1)..(19): ribonucleotide
ugggcuguucucgcuucggtt

SEQ ID NO: 976 - DNA, 21 bp, Artificial Sequence
  Synthetic construct
  misc_feature (1)..(19): ribonucleotide
ggaggagccgugguccgcgtt

SEQ ID NO: 977 - DNA, 21 bp, Artificial Sequence
  Synthetic construct
  misc_feature (1)..(19): ribonucleotide
gaggagccgugguccgcgctt

SEQ ID NO: 978 - DNA, 21 bp, Artificial Sequence
  Synthetic construct
  misc_feature (1)..(19): ribonucleotide
gggaggagccgcagccggatt

SEQ ID NO: 979 - DNA, 21 bp, Artificial Sequence
  Synthetic construct
  misc_feature (1)..(19): ribonucleotide
ggaggagccgcagccggagtt

SEQ ID NO: 980 - DNA, 21 bp, Artificial Sequence
  Synthetic construct
  misc_feature (1)..(19): ribonucleotide
gaggagccgcagccggaggtt

SEQ ID NO: 981 - DNA, 21 bp, Artificial Sequence
  Synthetic construct
  misc_feature (1)..(19): ribonucleotide
agagaaggaagaggagaggtt

SEQ ID NO: 982 - DNA, 21 bp, Artificial Sequence
  Synthetic construct
  misc_feature (1)..(19): ribonucleotide
gcuccagccgcgcgcgcuctt

SEQ ID NO: 983 - DNA, 21 bp, Artificial Sequence
  Synthetic construct
  misc_feature (1)..(19): ribonucleotide
cccacagcccgagccggagtt

SEQ ID NO: 984 - DNA, 21 bp, Artificial Sequence
  Synthetic construct
  misc_feature (1)..(19): ribonucleotide
ccacagcccgagccggagatt

SEQ ID NO: 985 - DNA, 21 bp, Artificial Sequence
  Synthetic construct
  misc_feature (1)..(19): ribonucleotide
caugaacuuucugcugucutt

SEQ ID NO: 986 - DNA, 21 bp, Artificial Sequence
  Synthetic construct
  misc_feature (1)..(19): ribonucleotide
acuuucugcugucuugggutt

SEQ ID NO: 987 - DNA, 21 bp, Artificial Sequence
  Synthetic construct
  misc_feature (1)..(19): ribonucleotide
ugcugucuugggugcauugtt

SEQ ID NO: 988 - DNA, 21 bp, Artificial Sequence
  Synthetic construct
  misc_feature (1)..(19): ribonucleotide
ugcauuggagccuugccuutt

SEQ ID NO: 989 - DNA, 21 bp, Artificial Sequence
  Synthetic construct
  misc_feature (1)..(19): ribonucleotide
cuugccuugcugcucuacctt

SEQ ID NO: 990 - DNA, 21 bp, Artificial Sequence
  Synthetic construct
  misc_feature (1)..(19): ribonucleotide
accuccaccaugccaagugtt

SEQ ID NO: 991 - DNA, 21 bp, Artificial Sequence
  Synthetic construct
  misc_feature (1)..(19): ribonucleotide
ccuccaccaugccaaguggtt

SEQ ID NO: 992 - DNA, 21 bp, Artificial Sequence
  Synthetic construct
  misc_feature (1)..(19): ribonucleotide
ccaugccaaguggucccagtt

SEQ ID NO: 993 - DNA, 21 bp, Artificial Sequence
  Synthetic construct
  misc_feature (1)..(19): ribonucleotide
ccaggcugcacccauggcatt

SEQ ID NO: 994 - DNA, 21 bp, Artificial Sequence
  Synthetic construct
  misc_feature (1)..(19): ribonucleotide
ucuaucagcgcagcuacugtt

SEQ ID NO: 995 - DNA, 21 bp, Artificial Sequence
  Synthetic construct
  misc_feature (1)..(19): ribonucleotide
ucuuccaggaguacccugatt

SEQ ID NO: 996 - DNA, 21 bp, Artificial Sequence
  Synthetic construct
  misc_feature (1)..(19): ribonucleotide
ucuucaagccauccugugutt

SEQ ID NO: 997 - DNA, 21 bp, Artificial Sequence
  Synthetic construct
  misc_feature (1)..(19): ribonucleotide
aaugacgagggccuggagutt

SEQ ID NO: 998 - DNA, 21 bp, Artificial Sequence
  Synthetic construct
  misc_feature (1)..(19): ribonucleotide
ggccuggagugugugcccatt

SEQ ID NO: 999 - DNA, 21 bp, Artificial Sequence
  Synthetic construct
  misc_feature (1)..(19): ribonucleotide
cacugaggaguccaacauctt

SEQ ID NO: 1000 - DNA, 21 bp, Artificial Sequence
  Synthetic construct
  misc_feature (1)..(19): ribonucleotide
caacaucaccaugcagauutt

SEQ ID NO: 1001 - DNA, 21 bp, Artificial Sequence
  Synthetic construct
  misc_feature (1)..(19): ribonucleotide
aucaccaugcagauuaugctt

SEQ ID NO: 1002 - DNA, 21 bp, Artificial Sequence
  Synthetic construct
  misc_feature (1)..(19): ribonucleotide
cagauuaugcggaucaaactt

SEQ ID NO: 1003 - DNA, 21 bp, Artificial Sequence
  Synthetic construct
  misc_feature (1)..(19): ribonucleotide
agauuaugcggaucaaacctt

SEQ ID NO: 1004 - DNA, 21 bp, Artificial Sequence
  Synthetic construct
  misc_feature (1)..(19): ribonucleotide
gauuaugcggaucaaaccutt

SEQ ID NO: 1005 - DNA, 21 bp, Artificial Sequence
  Synthetic construct
  misc_feature (1)..(19): ribonucleotide
aggagagaugagcuuccuatt

SEQ ID NO: 1006 - DNA, 21 bp, Artificial Sequence
  Synthetic construct
  misc_feature (1)..(19): ribonucleotide
gagcuuccuacagcacaactt

SEQ ID NO: 1007 - DNA, 21 bp, Artificial Sequence
  Synthetic construct
  misc_feature (1)..(19): ribonucleotide
cuuccuacagcacaacaaatt

SEQ ID NO: 1008 - DNA, 21 bp, Artificial Sequence
  Synthetic construct
  misc_feature (1)..(19): ribonucleotide
acagcacaacaaaugugaatt

SEQ ID NO: 1009 - DNA, 21 bp, Artificial Sequence
  Synthetic construct
  misc_feature (1)..(19): ribonucleotide
cagcacaacaaaugugaautt

SEQ ID NO: 1010 - DNA, 21 bp, Artificial Sequence
  Synthetic construct
  misc_feature (1)..(19): ribonucleotide
aaaugugaaugcagaccaatt

SEQ ID NO: 1011 - DNA, 21 bp, Artificial Sequence
  Synthetic construct
  misc_feature (1)..(19): ribonucleotide
uuuaagaaaaaagaagaggtt

SEQ ID NO: 1012 - DNA, 21 bp, Artificial Sequence
  Synthetic construct
  misc_feature (1)..(19): ribonucleotide
guuuaagaaaaaagaagagtt

SEQ ID NO: 1013 - DNA, 21 bp, Artificial Sequence
  Synthetic construct
  misc_feature (1)..(19): ribonucleotide
uguuuaagaaaaaagaagatt

SEQ ID NO: 1014 - DNA, 21 bp, Artificial Sequence
  Synthetic construct
  misc_feature (1)..(19): ribonucleotide
aauguuuaagaaaaaagaatt

SEQ ID NO: 1015 - DNA, 21 bp, Artificial Sequence
  Synthetic construct
  misc_feature (1)..(19): ribonucleotide
aaaaauguuuaagaaaaaatt

SEQ ID NO: 1016 - DNA, 21 bp, Artificial Sequence
  Synthetic construct
  misc_feature (1)..(19): ribonucleotide
aaaaaaauguuuaagaaaatt

SEQ ID NO: 1017 - DNA, 21 bp, Artificial Sequence
  Synthetic construct
  misc_feature (1)..(19): ribonucleotide
aaaaaaaauguuuaagaaatt

SEQ ID NO: 1018 - DNA, 21 bp, Artificial Sequence
  Synthetic construct
  misc_feature (1)..(19): ribonucleotide
acaguuuuaaaaaaaaaugtt

SEQ ID NO: 1019 - DNA, 21 bp, Artificial Sequence
  Synthetic construct
  misc_feature (1)..(19): ribonucleotide
aacaauacaguuuuaaaaatt

SEQ ID NO: 1020 - DNA, 21 bp, Artificial Sequence
  Synthetic construct
  misc_feature (1)..(19): ribonucleotide
aaacaauacaguuuuaaaatt

SEQ ID NO: 1021 - DNA, 21 bp, Artificial Sequence
  Synthetic construct
  misc_feature (1)..(19): ribonucleotide
cgagaaacaauacaguuuutt

SEQ ID NO: 1022 - DNA, 21 bp, Artificial Sequence
  Synthetic construct
  misc_feature (1)..(19): ribonucleotide
uaaauuaaaacgagaaacatt

SEQ ID NO: 1023 - DNA, 21 bp, Artificial Sequence
  Synthetic construct
  misc_feature (1)..(19): ribonucleotide
gggaauggcaagcaaaaautt

SEQ ID NO: 1024 - DNA, 21 bp, Artificial Sequence
  Synthetic construct
  misc_feature (1)..(19): ribonucleotide
ucggcccgauucaagugggtt

SEQ ID NO: 1025 - DNA, 21 bp, Artificial Sequence
  Synthetic construct
  misc_feature (1)..(19): ribonucleotide
gucggcccgauucaaguggtt

SEQ ID NO: 1026 - DNA, 21 bp, Artificial Sequence
  Synthetic construct
  misc_feature (1)..(19): ribonucleotide
uuccucgacuucucucuggtt

SEQ ID NO: 1027 - DNA, 21 bp, Artificial Sequence
  Synthetic construct
  misc_feature (1)..(19): ribonucleotide
cuuccucgacuucucucugtt

SEQ ID NO: 1028 - DNA, 21 bp, Artificial Sequence
  Synthetic construct
  misc_feature (1)..(19): ribonucleotide
cgcccgcgcgcucucucugtt

SEQ ID NO: 1029 - DNA, 21 bp, Artificial Sequence
  Synthetic construct
  misc_feature (1)..(19): ribonucleotide
ucagcgcgacuggucagcutt

SEQ ID NO: 1030 - DNA, 21 bp, Artificial Sequence
  Synthetic construct
  misc_feature (1)..(19): ribonucleotide
cuccgggcgcgggcuccggtt

SEQ ID NO: 1031 - DNA, 21 bp, Artificial Sequence
  Synthetic construct
  misc_feature (1)..(19): ribonucleotide
ccuccgggcgcgggcuccgtt

SEQ ID NO: 1032 - DNA, 21 bp, Artificial Sequence
  Synthetic construct
  misc_feature (1)..(19): ribonucleotide
gccuccgggcgcgggcucctt

SEQ ID NO: 1033 - DNA, 21 bp, Artificial Sequence
  Synthetic construct
  misc_feature (1)..(19): ribonucleotide
guuggacgaaaaguuucagtt

SEQ ID NO: 1034 - DNA, 21 bp, Artificial Sequence
  Synthetic construct
  misc_feature (1)..(19): ribonucleotide
aguuggacgaaaaguuucatt

SEQ ID NO: 1035 - DNA, 21 bp, Artificial Sequence
  Synthetic construct
  misc_feature (1)..(19): ribonucleotide
aaguuggacgaaaaguuuctt

SEQ ID NO: 1036 - DNA, 21 bp, Artificial Sequence
  Synthetic construct
  misc_feature (1)..(19): ribonucleotide
ccagaaguuggacgaaaagtt

SEQ ID NO: 1037 - DNA, 21 bp, Artificial Sequence
  Synthetic construct
  misc_feature (1)..(19): ribonucleotide
gaagcgagaacagcccagatt

SEQ ID NO: 1038 - DNA, 21 bp, Artificial Sequence
  Synthetic construct
  misc_feature (1)..(19): ribonucleotide
ccgaagcgagaacagcccatt

SEQ ID NO: 1039 - DNA, 21 bp, Artificial Sequence
  Synthetic construct
  misc_feature (1)..(19): ribonucleotide
cgcggaccacggcuccucctt

SEQ ID NO: 1040 - DNA, 21 bp, Artificial Sequence
  Synthetic construct
  misc_feature (1)..(19): ribonucleotide
gcgcggaccacggcuccuctt

SEQ ID NO: 1041 - DNA, 21 bp, Artificial Sequence
  Synthetic construct
  misc_feature (1)..(19): ribonucleotide
uccggcugcggcuccuccctt

SEQ ID NO: 1042 - DNA, 21 bp, Artificial Sequence
  Synthetic construct
  misc_feature (1)..(19): ribonucleotide
cuccggcugcggcuccucctt

SEQ ID NO: 1043 - DNA, 21 bp, Artificial Sequence
  Synthetic construct
  misc_feature (1)..(19): ribonucleotide
ccuccggcugcggcuccuctt

SEQ ID NO: 1044 - DNA, 21 bp, Artificial Sequence
  Synthetic construct
  misc_feature (1)..(19): ribonucleotide
ccucuccucuuccuucucutt

SEQ ID NO: 1045 - DNA, 21 bp, Artificial Sequence
  Synthetic construct
  misc_feature (1)..(19): ribonucleotide
gagcgcgcgcggcuggagctt

SEQ ID NO: 1046 - DNA, 21 bp, Artificial Sequence
  Synthetic construct
  misc_feature (1)..(19): ribonucleotide
cuccggcucgggcugugggtt

SEQ ID NO: 1047 - DNA, 21 bp, Artificial Sequence
  Synthetic construct
  misc_feature (1)..(19): ribonucleotide
ucuccggcucgggcuguggtt

SEQ ID NO: 1048 - DNA, 21 bp, Artificial Sequence
  Synthetic construct
  misc_feature (1)..(19): ribonucleotide
agacagcagaaaguucaugtt

SEQ ID NO: 1049 - DNA, 21 bp, Artificial Sequence
  Synthetic construct
  misc_feature (1)..(19): ribonucleotide
acccaagacagcagaaagutt

SEQ ID NO: 1050 - DNA, 21 bp, Artificial Sequence
  Synthetic construct
  misc_feature (1)..(19): ribonucleotide
caaugcacccaagacagcatt

SEQ ID NO: 1051 - DNA, 21 bp, Artificial Sequence
  Synthetic construct
  misc_feature (1)..(19): ribonucleotide
aaggcaaggcuccaaugcatt

SEQ ID NO: 1052 - DNA, 21 bp, Artificial Sequence
  Synthetic construct
  misc_feature (1)..(19): ribonucleotide
gguagagcagcaaggcaagtt

SEQ ID NO: 1053 - DNA, 21 bp, Artificial Sequence
  Synthetic construct
  misc_feature (1)..(19): ribonucleotide
cacuuggcaugguggaggutt

SEQ ID NO: 1054 - DNA, 21 bp, Artificial Sequence
  Synthetic construct
  misc_feature (1)..(19): ribonucleotide
ccacuuggcaugguggaggtt

SEQ ID NO: 1055 - DNA, 21 bp, Artificial Sequence
  Synthetic construct
  misc_feature (1)..(19): ribonucleotide
cugggaccacuuggcauggtt

SEQ ID NO: 1056 - DNA, 21 bp, Artificial Sequence
  Synthetic construct
  misc_feature (1)..(19): ribonucleotide
ugccaugggugcagccuggtt

SEQ ID NO: 1057 - DNA, 21 bp, Artificial Sequence
  Synthetic construct
  misc_feature (1)..(19): ribonucleotide
caguagcugcgcugauagatt

SEQ ID NO: 1058 - DNA, 21 bp, Artificial Sequence
  Synthetic construct
  misc_feature (1)..(19): ribonucleotide
ucaggguacuccuggaagatt

SEQ ID NO: 1059 - DNA, 21 bp, Artificial Sequence
  Synthetic construct
  misc_feature (1)..(19): ribonucleotide
acacaggauggcuugaagatt

SEQ ID NO: 1060 - DNA, 21 bp, Artificial Sequence
  Synthetic construct
  misc_feature (1)..(19): ribonucleotide
acuccaggcccucgucauutt

SEQ ID NO: 1061 - DNA, 21 bp, Artificial Sequence
  Synthetic construct
  misc_feature (1)..(19): ribonucleotide
ugggcacacacuccaggcctt

SEQ ID NO: 1062 - DNA, 21 bp, Artificial Sequence
  Synthetic construct
  misc_feature (1)..(19): ribonucleotide
gauguuggacuccucagugtt

SEQ ID NO: 1063 - DNA, 21 bp, Artificial Sequence
  Synthetic construct
  misc_feature (1)..(19): ribonucleotide
aaucugcauggugauguugtt

SEQ ID NO: 1064 - DNA, 21 bp, Artificial Sequence
  Synthetic construct
  misc_feature (1)..(19): ribonucleotide
gcauaaucugcauggugautt

SEQ ID NO: 1065 - DNA, 21 bp, Artificial Sequence
  Synthetic construct
  misc_feature (1)..(19): ribonucleotide
guuugauccgcauaaucugtt

SEQ ID NO: 1066 - DNA, 21 bp, Artificial Sequence
  Synthetic construct
  misc_feature (1)..(19): ribonucleotide
gguuugauccgcauaaucutt

SEQ ID NO: 1067 - DNA, 21 bp, Artificial Sequence
  Synthetic construct
  misc_feature (1)..(19): ribonucleotide
agguuugauccgcauaauctt

SEQ ID NO: 1068 - DNA, 21 bp, Artificial Sequence
  Synthetic construct
  misc_feature (1)..(19): ribonucleotide
uaggaagcucaucucuccutt

SEQ ID NO: 1069 - DNA, 21 bp, Artificial Sequence
  Synthetic construct
  misc_feature (1)..(19): ribonucleotide
guugugcuguaggaagcuctt

SEQ ID NO: 1070 - DNA, 21 bp, Artificial Sequence
  Synthetic construct
  misc_feature (1)..(19): ribonucleotide
uuuguugugcuguaggaagtt

SEQ ID NO: 1071 - DNA, 21 bp, Artificial Sequence
  Synthetic construct
  misc_feature (1)..(19): ribonucleotide
uucacauuuguugugcugutt

SEQ ID NO: 1072 - DNA, 21 bp, Artificial Sequence
  Synthetic construct
  misc_feature (1)..(19): ribonucleotide
auucacauuuguugugcugtt

SEQ ID NO: 1073 - DNA, 21 bp, Artificial Sequence
  Synthetic construct
  misc_feature (1)..(19): ribonucleotide
uuggucugcauucacauuutt

SEQ ID NO: 1074 - DNA, 43 bp, Artificial Sequence
  Synthetic construct
  misc_feature (1)..(19): ribonucleotide
  misc_feature (22)..(22): n stands for 5-nitroindole universal base
  misc_feature (23)..(41): ribonucleotide
ggacaucuuccaggaguacttngaacugaguuuaaaaggcatt

SEQ ID NO: 1075 - DNA, 43 bp, Artificial Sequence
  Synthetic construct
  misc_feature (1)..(19): ribonucleotide
  misc_feature (22)..(22): n stands for 5-nitroindole universal base
  misc_feature (23)..(41): ribonucleotide
gugaaugcagaccaaagaattngaacugaguuuaaaaggcatt

SEQ ID NO: 1076 - DNA, 43 bp, Artificial Sequence
  Synthetic construct
  misc_feature (1)..(19): ribonucleotide
  misc_feature (22)..(22): n stands for 5-nitroindole universal base
  misc_feature (23)..(41): ribonucleotide
gcacuucgcuucaccucugttnggacuucucucaauuuucutt

SEQ ID NO: 1077 - DNA, 43 bp, Artificial Sequence
  Synthetic construct
  misc_feature (1)..(19): ribonucleotide
  misc_feature (22)..(22): n stands for 5-nitroindole universal base
  misc_feature (23)..(41): ribonucleotide
ugagcauggaagaggauucttngaacugaguuuaaaaggcatt

SEQ ID NO: 1078 - DNA, 43 bp, Artificial Sequence
  Synthetic construct
  misc_feature (1)..(19): ribonucleotide
  misc_feature (22)..(22): n stands for 5-nitroindole universal base
  misc_feature (23)..(41): ribonucleotide
ggauuaccagggauuucagttnauaaggcuaugaagagauatt

SEQ ID NO: 1079 - DNA, 43 bp, Artificial Sequence
  Synthetic construct
  misc_feature (1)..(19): ribonucleotide
  misc_feature (22)..(22): n stands for 5-nitroindole universal base
  misc_feature (23)..(41): ribonucleotide
gaguuguguuuguggacgattnauaaggcuaugaagagauatt

SEQ ID NO: 1080 - DNA, 43 bp, Artificial Sequence
  Synthetic construct
  misc_feature (1)..(19): ribonucleotide
  misc_feature (22)..(22): n stands for 5-nitroindole universal base
  misc_feature (23)..(41): ribonucleotide
ccgggaggucucguagaccttngcgaaaggccuugugguactt

SEQ ID NO: 1081 - DNA, 43 bp, Artificial Sequence
  Synthetic construct
  misc_feature (1)..(19): ribonucleotide
  misc_feature (22)..(22): n stands for 5-nitroindole universal base
  misc_feature (23)..(41): ribonucleotide modified as described
ccgggaggucucguagaccttnauagggugcuugcgagugctt

SEQ ID NO: 1082 - DNA, 43 bp, Artificial Sequence
  Synthetic construct
  misc_feature (1)..(19): ribonucleotide
  misc_feature (22)..(22): n stands for 5-nitroindole universal base
  misc_feature (23)..(41): ribonucleotide
gaacugaguuuaaaaggcattngugaaugcagaccaaagaatt

SEQ ID NO: 1083 - DNA, 43 bp, Artificial Sequence
  Synthetic construct
  misc_feature (1)..(19): ribonucleotide
  misc_feature (22)..(22): n stands for 5-nitroindole universal base
  misc_feature (23)..(41): ribonucleotide
ugacggaaaaagagaucguttnauaaggcuaugaagagauatt

SEQ ID NO: 1084 - DNA, 43 bp, Artificial Sequence; identical to SEQ ID NO: 1083
  Synthetic construct
  misc_feature (1)..(19): ribonucleotide
  misc_feature (22)..(22): n stands for C12 spacer
  misc_feature (23)..(41): ribonucleotide

SEQ ID NO: 1085 - DNA, 43 bp, Artificial Sequence; identical to SEQ ID NO: 1083
  Synthetic construct
  misc_feature (1)..(19): ribonucleotide
  misc_feature (22)..(22): n stands for tetraethelyne glycol spacer
  misc_feature (23)..(41): ribonucleotide

SEQ ID NO: 1086 - DNA, 43 bp, Artificial Sequence; identical to SEQ ID NO: 1083
  Synthetic construct
  misc_feature (1)..(19): ribonucleotide
  misc_feature (22)..(22): n stands for 3-nitropyrrole universal base
  misc_feature (23)..(41): ribonucleotide

SEQ ID NO: 1087 - DNA, 44 bp, Artificial Sequence
  Synthetic construct
  misc_feature (1)..(19): ribonucleotide
  misc_feature (22)..(23): n stands for 5-nitroindole universal base
  misc_feature (24)..(42): ribonucleotide
ugacggaaaaagagaucguttnnauaaggcuaugaagagauatt

SEQ ID NO: 1088 - DNA, 43 bp, Artificial Sequence
  Synthetic construct
  misc_feature (1)..(19): ribonucleotide
  misc_feature (22)..(22): n stands for 5-nitroindole universal base
  misc_feature (23)..(41): ribonucleotide
auaaggcuaugaagagauattnugacggaaaaagagaucgutt

SEQ ID NO: 1089 - DNA, 43 bp, Artificial Sequence
  Synthetic construct
  misc_feature (1)..(19): ribonucleotide
  misc_feature (22)..(22): n stands for 5-nitroindole universal base
  misc_feature (23)..(41): ribonucleotide
cguaugcagugaaaacucuttnugacggaaaaagagaucgutt

SEQ ID NO: 1090 - DNA, 43 bp, Artificial Sequence
  Synthetic construct
  misc_feature (1)..(19): ribonucleotide
  misc_feature (22)..(22): n stands for 5-nitroindole universal base
  misc_feature (23)..(41): ribonucleotide
cguaugcagugaaaacucuttnauaaggcuaugaagagauatt

SEQ ID NO: 1091 - DNA, 43 bp, Artificial Sequence
  Synthetic construct
  misc_feature (1)..(19): ribonucleotide
  misc_feature (22)..(22): n stands for 5-nitroindole universal base
  misc_feature (23)..(41): ribonucleotide
augcuggacugcuggcacattngugaaugcagaccaaagaatt

SEQ ID NO: 1092 - DNA, 43 bp, Artificial Sequence; identical to SEQ ID NO: 1091
  Synthetic construct
  misc_feature (1)..(19): ribonucleotide
  misc_feature (22)..(22): n stands for C12 spacer
  misc_feature (23)..(41): ribonucleotide

SEQ ID NO: 1093 - DNA, 43 bp, Artificial Sequence; identical to SEQ ID NO: 1091
  Synthetic construct
  misc_feature (1)..(19): ribonucleotide
  misc_feature (22)..(22): n stands for tetraethelyne glycol spacer
  misc_feature (23)..(41): ribonucleotide

SEQ ID NO: 1094 - DNA, 43 bp, Artificial Sequence; identical to SEQ ID NO: 1091
  Synthetic construct
  misc_feature (1)..(19): ribonucleotide
  misc_feature (22)..(22): n stands for 3-nitropyrrole universal base
  misc_feature (23)..(41): ribonucleotide

SEQ ID NO: 1095 - DNA, 44 bp, Artificial Sequence
  Synthetic construct
  misc_feature (1)..(19): ribonucleotide
  misc_feature (22)..(23): n stands for 5-nitroindole universal base
  misc_feature (24)..(42): ribonucleotide
augcuggacugcuggcacattnngugaaugcagaccaaagaatt

SEQ ID NO: 1096 - DNA, 43 bp, Artificial Sequence
  Synthetic construct
  misc_feature (1)..(19): ribonucleotide
  misc_feature (22)..(22): n stands for 5-nitroindole universal base
  misc_feature (23)..(41): ribonucleotide
auagggugcuugcgagugcttngcgaaaggccuugugguactt

SEQ ID NO: 1097 - DNA, 21 bp, Artificial Sequence
  Synthetic construct
  misc_feature (1)..(19): ribonucleotide
gaacugaguuuaaaaggcatt

SEQ ID NO: 1098 - DNA, 21 bp, Artificial Sequence
  Synthetic construct
  misc_feature (1)..(19): ribonucleotide
auaaggcuaugaagagauatt

SEQ ID NO: 1099 - DNA, 21 bp, Artificial Sequence
  Synthetic construct
  misc_feature (1)..(19): ribonucleotide
ugacggaaaaagagaucgutt

SEQ ID NO: 1100 - DNA, 21 bp, Artificial Sequence
  Synthetic construct
  misc_feature (1)..(19): ribonucleotide
gaguuguguuuguggacgatt

SEQ ID NO: 1101 - DNA, 21 bp, Artificial Sequence
  Synthetic construct
  misc_feature (1)..(19): ribonucleotide
cguaugcagugaaaacucutt

SEQ ID NO: 1102 - DNA, 21 bp, Artificial Sequence
  Synthetic construct
  misc_feature (1)..(19): ribonucleotide
ggauuaccagggauuucagtt

SEQ ID NO: 1103 - DNA, 21 bp, Artificial Sequence
  Synthetic construct
  misc_feature (1)..(19): ribonucleotide
gcgaaaggccuugugguactt

SEQ ID NO: 1104 - DNA, 21 bp, Artificial Sequence
  Synthetic construct
  misc_feature (1)..(19): ribonucleotide
auagggugcuugcgagugctt

SEQ ID NO: 1105 - DNA, 21 bp, Artificial Sequence
  Synthetic construct
  misc_feature (1)..(19): ribonucleotide
ugccuuuuaaacucaguuctt

SEQ ID NO: 1106 - DNA, 21 bp, Artificial Sequence
  Synthetic construct
  misc_feature (1)..(19): ribonucleotide
uaucucuucauagccuuautt

SEQ ID NO: 1107 - DNA, 21 bp, Artificial Sequence
  Synthetic construct
  misc_feature (1)..(19): ribonucleotide
acgaucucuuuuuccgucatt

SEQ ID NO: 1108 - DNA, 21 bp, Artificial Sequence
  Synthetic construct
  misc_feature (1)..(19): ribonucleotide
ucguccacaaacacaacuctt

SEQ ID NO: 1109 - DNA, 21 bp, Artificial Sequence
  Synthetic construct
  misc_feature (1)..(19): ribonucleotide
agaguuuucacugcauacgtt

SEQ ID NO: 1110 - DNA, 21 bp, Artificial Sequence
  Synthetic construct
  misc_feature (1)..(19): ribonucleotide
cugaaaucccugguaaucctt

SEQ ID NO: 1111 - DNA, 21 bp, Artificial Sequence
  Synthetic construct
  misc_feature (1)..(19): ribonucleotide
guaccacaaggccuuucgctt

SEQ ID NO: 1112 - DNA, 21 bp, Artificial Sequence
  Synthetic construct
  misc_feature (1)..(19): ribonucleotide
gcacucgcaagcacccuautt

SEQ ID NO: 1113 - DNA, 21 bp, Artificial Sequence
  Synthetic construct
  misc_feature (1)..(19): ribonucleotide
ggucuacgagaccucccggtt

SEQ ID NO: 1114 - protein, 16 aa, Artificial Sequence
  misc_feature: Synthetic peptide
  misc_feature (16)..(16): Amide-substituted carboxy terminus on the lysine residue
RQIKIWFQNRRMKWKK

SEQ ID NO: 1115 - protein, 26 aa, Artificial Sequence
  misc_feature: Synthetic peptide
AAVALLPAVLLALLAPVQRKRQKLMP

SEQ ID NO: 1116 - protein, 17 aa, Artificial Sequence
  misc_feature: Synthetic peptide
MGLGLHLLVLAAALQGA

SEQ ID NO: 1117 - protein, 24 aa, Artificial Sequence
  misc_feature: Synthetic peptide
GALFLGFLGAAGSTMGAPKSKRKV

SEQ ID NO: 1118 - protein, 9 aa, Artificial Sequence
  misc_feature: Synthetic peptide
RKKRRQRRR

SEQ ID NO: 1119 - protein, 24 aa, Artificial Sequence
  misc_feature: Synthetic peptide
GLFEAIAGFIENGWEGMIDGGGYC

SEQ ID NO: 1120 - protein, 5 aa, Artificial Sequence
  misc_feature (1)..(1): Xaa stands for any amino acid
  misc_feature (5)..(5): Xaa stands for any amino acid
  misc_feature: Synthetic peptide
XRGDX

SEQ ID NO: 1121 - protein, 27 aa, Artificial Sequence
  misc_feature: Synthetic peptide
GWTLNSAGYLLGKINLKALAALAKKIL

SEQ ID NO: 1122 - protein, 9 aa, Artificial Sequence
  misc_feature (1)..(1): Ser stands for optional Serine for coupling
  misc_feature (2)..(2): Phe stands for optional D isomer for stability
  misc_feature (5)..(5): Trp stands for optional D isomer for stability
  misc_feature: Synthetic peptide
SFCYWKTCT

SEQ ID NO: 1123 - protein, 9 aa, Artificial Sequence
  misc_feature (1)..(1): Ser stands for optional Serine for coupling
  misc_feature: Synthetic peptide
SDHQLNPAF

SEQ ID NO: 1124 - DNA, 40 bp, Artificial Sequence
  Synthetic construct
  misc_feature (1)..(38): ribonucleotide
ugccagcaguccagcauggugugaaugcagaccaaagatt

SEQ ID NO: 1125 - DNA, 40 bp, Artificial Sequence
  Synthetic construct
  misc_feature (1)..(38): ribonucleotide
ucuuuggucugcauucacaccaugcuggacugcuggcatt

SEQ ID NO: 1126 - RNA, 19 nt, Artificial Sequence
  Synthetic construct
caauuagaguggcagugag

SEQ ID NO: 1127 - RNA, 19 nt, Artificial Sequence
  Synthetic construct
cucacugccacucuaauug

SEQ ID NO: 1128 - RNA, 19 nt, Artificial Sequence
  Synthetic construct
gaaacgagugacggugaga

SEQ ID NO: 1129 - RNA, 19 nt, Artificial Sequence
  Synthetic construct
ucucaccgucacucguuuc

SEQ ID NO: 1130 - RNA, 24 nt, Artificial Sequence
  Synthetic construct
caauuagaguggcagugagcaaag

SEQ ID NO: 1131 - RNA, 24 nt, Artificial Sequence
  Synthetic construct
guuaaucucaccgucacucguuuc

SEQ ID NO: 1132 - RNA, 30 nt, Artificial Sequence
  Synthetic construct
caauuagaguggcaguggcagugagcaaag

SEQ ID NO: 1133 - RNA, 30 nt, Artificial Sequence
  Synthetic construct
guuaaucucaccgucaccgucacucguuuc

SEQ ID NO: 1134 - DNA, 21 bp, Artificial Sequence
  Synthetic construct
  misc_feature (1)..(4): Phosphorothioate or Phosphorodithioate 3'-Internucleotide Linkage (optionally absent)
  misc_feature (1)..(1): 5'-3 attached terminal deoxyabasic moiety inverted abasic, inverted nucleotide or other terminal cap that is optionally present
  misc_feature (17)..(20): Phosphorothioate or Phosphorodithioate 3'-Internucleotide Linkage (optionally absent)
  misc_feature (21)..(21): 3'-3 attached terminal deoxyabasic moiety inverted abasic, inverted nucleotide or other terminal cap that is optionally present
  misc_feature (1)..(19): ribonucleotide modified as described
  misc_feature (20)..(21): n stands for any nucleotide
nnnnnnnnnnnnnnnnnnnnn

SEQ ID NO: 1135 - DNA, 21 bp, Artificial Sequence
  Synthetic construct
  misc_feature (1)..(5): Phosphorothioate or Phosphorodithioate 3'-Internucleotide Linkage (optionally absent)
  misc_feature (20)..(20): Phosphorothioate or Phosphorodithioate 3'-Internucleotide Linkage (optionally absent)
  misc_feature (1)..(19): ribonucleotide modified as described
  misc_feature (20)..(21): n stands for any nucleotide
  misc_feature (21)..(21): 3'-3 attached terminal glyceryl moiety or inverted deoxyabasic (optionally present)
nnnnnnnnnnnnnnnnnnnnn

SEQ ID NO: 1136 - DNA, 21 bp, Artificial Sequence
  Synthetic construct
  misc_feature (1)..(19): n is any ribonucleotide wherein any pyrimidine is 2'-Fluoro or 2'-o-methyl
  misc_feature (20)..(20): Phosphorothioate or Phosphorodithioate 3'-Internucleotide Linkage (optionally absent)
  misc_feature (20)..(21): n stands for any nucleotide
nnnnnnnnnnnnnnnnnnnnn

SEQ ID NO: 1137 - DNA, 21 bp, Artificial Sequence
  Synthetic construct
  misc_feature (1)..(19): n is any ribonucleotide wherein any pyrimidine is 2'-Fluoro
  misc_feature (20)..(21): n stands for any nucleotide
  misc_feature (21)..(21): 3'-3 attached terminal glyceryl moiety or inverted deoxyabasic (optionally present)
nnnnnnnnnnnnnnnnnnnnn

SEQ ID NO: 1138 - DNA, 21 bp, Artificial Sequence
  Synthetic construct
  misc_feature (1)..(19): n is any ribonucleotide wherein any pyrimidine is 2'-O-methyl or 2'-Fluoro
  misc_feature (20)..(21): n stands for any nucleotide
  misc_feature (1)..(1): 5'-3 attached terminal deoxyabasic moiety, inverted abasic, inverted nucleotide or other terminal cap that is optionally present
  misc_feature (21)..(21): 3'-3 attached terminal deoxyabasic moiety, inverted abasic, inverted nucleotide or other terminal cap that is optionally present
nnnnnnnnnnnnnnnnnnnnn

SEQ ID NO: 1139 - DNA, 21 bp, Artificial Sequence
  Synthetic construct
  misc_feature (1)..(19): n is any ribonucleotide wherein any pyrimidine is 2'-Fluoro
  misc_feature (20)..(20): Phosphorothioate or Phosphorodithioate 3'-Internucleotide Linkage (optionally absent)
  misc_feature (20)..(21): n stands for any nucleotide
  misc_feature (21)..(21): 3'-3 attached terminal glyceryl moiety or inverted deoxyabasic (optionally present)
nnnnnnnnnnnnnnnnnnnnn

SEQ ID NO: 1140 - DNA, 21 bp, Artificial Sequence
  Synthetic construct
  misc_feature (1)..(19): n is any ribonucleotide wherein any pyrimidine is 2'-Fluoro and any purine is 2'-Deoxy
  misc_feature (20)..(21): n stands for any nucleotide
  misc_feature (1)..(1): 5'-3 attached terminal deoxyabasic moiety, inverted abasic, inverted nucleotide or other terminal cap that is optionally present
  misc_feature (21)..(21): 3'-3 attached terminal deoxyabasic moiety, inverted abasic, inverted nucleotide or other terminal cap that is optionally present
nnnnnnnnnnnnnnnnnnnnn

SEQ ID NO: 1141 - DNA, 21 bp, Artificial Sequence
  Synthetic construct
  misc_feature (1)..(19): n is any ribonucleotide wherein any pyrimidine is 2'-Fluoro and any purine is 2'-O-methyl
  misc_feature (20)..(20): Phosphorothioate or Phosphorodithioate 3'-Internucleotide Linkage (optionally absent)
  misc_feature (20)..(21): n stands for any nucleotide
  misc_feature (21)..(21): 3'-3 attached terminal glyceryl moiety or inverted deoxyabasic (optionally present)
nnnnnnnnnnnnnnnnnnnnn

SEQ ID NO: 1142 - DNA, 21 bp, Artificial Sequence
  Synthetic construct
  misc_feature (1)..(19): n is any ribonucleotide wherein any pyrimidine is 2'-Fluoro
  misc_feature (20)..(21): n stands for any nucleotide
  misc_feature (1)..(1): 5'-3 attached terminal deoxyabasic moiety, inverted abasic, inverted nucleotide or other terminal cap that is optionally present
  misc_feature (21)..(21): 3'-3 attached terminal deoxyabasic moiety, inverted abasic, inverted nucleotide or other terminal cap that is optionally present
nnnnnnnnnnnnnnnnnnnnn

SEQ ID NO: 1143 - DNA, 21 bp, Artificial Sequence
  Synthetic construct
  misc_feature (1)..(19): n is any ribonucleotide wherein any pyrimidine is 2'-Fluoro and any purine is 2'-deoxy
  misc_feature (20)..(21): n stands for any nucleotide
  misc_feature (20)..(20): Phosphorothioate or Phosphorodithioate 3'-Internucleotide Linkage (optionally absent)
  misc_feature (21)..(21): 3'-3 attached terminal glyceryl moiety or inverted deoxyabasic (optionally present)
nnnnnnnnnnnnnnnnnnnnn

SEQ ID NO: 1144 - DNA, 21 bp, Artificial Sequence
  Synthetic construct
  misc_feature (1)..(4): Phosphorothioate or Phosphorodithioate 3'-Internucleotide Linkage (optionally present)
  misc_feature (1)..(4): 2'-O-Methyl or 2'-deoxy-2'-Fluoro
  misc_feature (11)..(14): 2'-O-Methyl or 2'-deoxy-2'-Fluoro
  misc_feature (16)..(16): 2'-O-Methyl or 2'-deoxy-2'-Fluoro
  misc_feature (17)..(20): Phosphorothioate or Phosphorodithioate 3'-Internucleotide Linkage (optionally present)
  misc_feature (1)..(19): ribonucleotide modified as described
ccccgggaggucucguagatt

SEQ ID NO: 1145 - DNA, 21 bp, Artificial Sequence
  Synthetic construct
  misc_feature (1)..(4): Phosphorothioate or Phosphorodithioate 3'-Internucleotide Linkage (optionally present)
  misc_feature (1)..(3): 2'-deoxy-2'-Fluoro
  misc_feature (5)..(5): 2'-deoxy-2'-Fluoro
  misc_feature (10)..(15): 2'-deoxy-2'-Fluoro
  misc_feature (20)..(20): Phosphorothioate or Phosphorodithioate 3'-Internucleotide Linkage (optionally present)
  misc_feature (1)..(19): ribonucleotide modified as described
  misc_feature (21)..(21): 3'-3 attached terminal glyceryl moiety or inverted deoxyabasic (optionally present)
ucuacgagaccucccggggtt

SEQ ID NO: 1146 - DNA, 21 bp, Artificial Sequence
  Synthetic construct
  misc_feature (1)..(4): 2'-O-Methyl or 2'-deoxy-2'-Fluoro
  misc_feature (11)..(14): 2'-O-Methyl or 2'-deoxy-2'-Fluoro
  misc_feature (16)..(17): 2'-O-Methyl or 2'-deoxy-2'-Fluoro
  misc_feature (20)..(20): Phosphorothioate or Phosphorodithioate 3'-Internucleotide Linkage (optionally present)
  misc_feature (1)..(19): ribonucleotide modified as described
ccccgggaggucucguagatt

SEQ ID NO: 1147 - DNA, 21 bp, Artificial Sequence
  Synthetic construct
  misc_feature (1)..(3): 2'-deoxy-2'-Fluoro
  misc_feature (5)..(5): 2'-deoxy-2'-Fluoro
  misc_feature (10)..(15): 2'-deoxy-2'-Fluoro
  misc_feature (1)..(19): ribonucleotide modified as described
  misc_feature (21)..(21): 3'-3 attached terminal glyceryl moiety or inverted deoxyabasic (optionally present)
ucuacgagaccucccggggtt

SEQ ID NO: 1148 - DNA, 21 bp, Artificial Sequence
  Synthetic construct
  misc_feature (1)..(4): 2'-O-Methyl or 2'-deoxy-2'-Fluoro
  misc_feature (11)..(14): 2'-O-Methyl or 2'-deoxy-2'-Fluoro
  misc_feature (16)..(16): 2'-O-Methyl or 2'-deoxy-2'-Fluoro
  misc_feature (1)..(1): 5'-3 attached terminal deoxyabasic moiety, inverted abasic, inverted nucleotide or other terminal cap that is optionally present
  misc_feature (21)..(21): 3'-3 attached terminal deoxyabasic moiety, inverted abasic, inverted nucleotide or other terminal cap that is optionally present
  misc_feature (1)..(19): ribonucleotide modified as described
ccccgggaggucucguagatt

SEQ ID NO: 1149 - DNA, 21 bp, Artificial Sequence
  Synthetic construct
  misc_feature (1)..(3): 2'-deoxy-2'-Fluoro
  misc_feature (5)..(5): 2'-deoxy-2'-Fluoro
  misc_feature (10)..(15): 2'-deoxy-2'-Fluoro
  misc_feature (1)..(19): ribonucleotide modified as described
  misc_feature (20)..(20): Phosphorothioate or Phosphorodithioate 3'-Internucleotide Linkage (optionally present)
  misc_feature (21)..(21): 3'-3 attached terminal glyceryl moiety or inverted deoxyabasic (optionally present)
ucuacgagaccucccggggtt

SEQ ID NO: 1150 - DNA, 21 bp, Artificial Sequence
  Synthetic construct
  misc_feature (5)..(10): 2'-deoxy
  misc_feature (15)..(15): 2'-deoxy
  misc_feature (17)..(19): 2'-deoxy
  misc_feature (1)..(4): 2'-deoxy-2'-Fluoro
  misc_feature (11)..(14): 2'-deoxy-2'-Fluoro
  misc_feature (16)..(16): 2'-deoxy-2'-Fluoro
  misc_feature (1)..(1): 5'-3 attached terminal deoxyabasic moiety, inverted abasic, inverted nucleotide or other terminal cap that is optionally present
  misc_feature (21)..(21): 3'-3 attached terminal deoxyabasic moiety, inverted abasic, inverted nucleotide or other terminal cap that is optionally present
  misc_feature (1)..(19): ribonucleotide modified as described
ccccgggaggucucguagatt

SEQ ID NO: 1151 - DNA, 21 bp, Artificial Sequence
  Synthetic construct
  misc_feature (1)..(3): 2'-deoxy-2'-Fluoro
  misc_feature (5)..(5): 2'-deoxy-2'-Fluoro
  misc_feature (10)..(15): 2'-deoxy-2'-Fluoro
  misc_feature (4)..(4): 2'-O-methyl
  misc_feature (6)..(9): 2'-O-methyl
  misc_feature (16)..(19): 2'-O-methyl
  misc_feature (1)..(19): ribonucleotide modified as described
  misc_feature (20)..(20): Phosphorothioate or Phosphorodithioate 3'-Internucleotide Linkage (optionally present)
  misc_feature (21)..(21): 3'-3 attached terminal glyceryl moiety or inverted deoxyabasic (optionally present)
ucuacgagaccucccggggtt

SEQ ID NO: 1152 - DNA, 21 bp, Artificial Sequence
  Synthetic construct
  misc_feature (1)..(4): 2'-deoxy-2'-Fluoro
  misc_feature (11)..(14): 2'-deoxy-2'-Fluoro
  misc_feature (16)..(16): 2'-deoxy-2'-Fluoro
  misc_feature (1)..(1): 5'-3 attached terminal deoxyabasic moiety, inverted abasic, inverted nucleotide or other terminal cap that is optionally present
  misc_feature (21)..(21): 3'-3 attached terminal deoxyabasic moiety, inverted abasic, inverted nucleotide or other terminal cap that is optionally present
  misc_feature (1)..(19): ribonucleotide modified as described
ccccgggaggucucguagatt

SEQ ID NO: 1153 - DNA, 21 bp, Artificial Sequence
  Synthetic construct
  misc_feature (1)..(3): 2'-deoxy
  misc_feature (5)..(5): 2'-deoxy
  misc_feature (10)..(15): 2'-deoxy
  misc_feature (4)..(4): 2'-deoxy-2'-Fluoro
  misc_feature (6)..(9): 2'-deoxy-2'-Fluoro
  misc_feature (16)..(19): 2'-deoxy-2'-Fluoro
  misc_feature (1)..(19): ribonucleotide modified as described
  misc_feature (20)..(20): Phosphorothioate or Phosphorodithioate 3'-Internucleotide Linkage (optionally present)
  misc_feature (21)..(21): 3'-3 attached terminal glyceryl moiety or inverted deoxyabasic (optionally present)
ucuacgagaccucccggggtt

SEQ ID NO: 1154 - RNA, 14 nt, Artificial Sequence
  Synthetic construct
auauaucuauuucg

SEQ ID NO: 1155 - RNA, 14 nt, Artificial Sequence
  Synthetic construct
cgaaauaguauaua

SEQ ID NO: 1156 - RNA, 22 nt, Artificial Sequence
  Synthetic construct
cgaaauaguauauacuauuugc

SEQ ID NO: 1157 - DNA, 24 bp, Artificial Sequence
  Synthetic construct
  misc_feature (1)..(19): ribonucleotide modified as described
cgaaauaguauauacuauuugctt
